(19) United States
(12) Patent Application Publication
(10) Pub. No.: US 2025/0223657 A1
(43) Pub. Date: Jul. 10, 2025

(54) IDENTIFICATION OF A UNIQUE BACTERIAL STRAIN THAT CONFERS RISK OF RHEUMATOID ARTHRITIS AND RELATED MATERIALS AND METHODS

(71) Applicants: THE REGENTS OF THE UNIVERSITY OF COLORADO, a body corporate, Denver, CO (US); THE BOARD OF TRUSTEES OF THE LELAND STANFORD JUNIOR UNIVERSITY, Stanford, CA (US)

(72) Inventors: Kristine KUHN, Denver, CO (US); Meagan CHRISWELL, Aurora, CO (US); Michael V. HOLERS, Denver, CO (US); Brendan ALLEN, Aurora, CO (US); William H. ROBINSON, Stanford, CA (US)

(21) Appl. No.: 18/880,133

(22) PCT Filed: Jun. 30, 2023
(86) PCT No.: PCT/US2023/069489

§ 371 Date: Jan. 22, 2025

Related U.S. Application Data
(60) Provisional application No. 63/357,590, filed on Jun. 30, 2022.

(51) Int. Cl. C12Q 1/689

(52) U.S. Cl. CPC C12Q 1/689; C12Q 2600/156

(57) ABSTRACT

Methods for the early detection of subjects at risk of developing rheumatoid arthritis, and subjects having early rheumatoid arthritis thus allowing for early intervention.

### STATEMENT REGARDING FEDERALLY SPONSORED RESEARCH

[0001] This invention was made with government support under Grant Nos. U01AI101981, R01 AR075033, and P30 AR079369 awarded by the National Institutes of Health. The government has certain rights in the invention.

### SEQUENCE LISTING

[0002] The instant application contains a Sequence Listing which has been submitted electronically in XML format created on Jun. 30, 2023, named 2848-348-PCT.xml is 2,513,000 bytes in size, and is hereby incorporated by reference in its entirety.

### BACKGROUND

[0003] Rheumatoid arthritis (RA) is a progressive, systemic autoimmune disease characterized by chronic inflammation of multiple joints with associated symptoms such as fatigue. The inflammation causes joint pain, stiffness, and swelling resulting in loss of joint function due to destruction of bone and cartilage. RA often leads to progressive disability. Patients with RA also have an increased likelihood of developing other systemic complications such as osteoporosis, anemia, cardiovascular disease, and disorders affecting the lungs and skin. The disease shortens the average life expectancy of affected patients by three to seven years. About 0.5-1% of the US adult population is affected by RA, and given the average age of onset is approximately 50, the number of affected individuals is expected to rise. Despite declining rates of disability attributed to RA, about 30% of patients do not achieve a minimally acceptable symptom state.

[0004] Early treatment of RA is associated with decreased joint damage and disability. In addition, studies performed in individuals considered to have pre-RA, defined as clinical risk for RA but not yet exhibiting classifiable disease, have demonstrated only marginally effective prevention of clinical RA onset. In addition, identification of individuals at risk for developing RA is a challenging and inexact process. Currently, prediction tools for the development of RA are based on circulating antibodies and genetic factors. These tools can classify only 30-40% of individuals with RA as high risk of developing RA in the next 2-3 years.

[0005] New methods are needed for identifying individuals at risk for developing RA or in an early stage of RA, and new therapeutic strategies are needed in the pre-RA period to prevent the onset of clinical disease.

### SUMMARY

[0006] The mucosal origins hypothesis of rheumatoid arthritis (RA) development proposes a central role for mucosal immune responses in the initiation and/or perpetuation of the systemic autoimmunity that occurs with disease and begins well before arthritis develops. As described in WO 2022/099317, using multiple independent methods, a novel species and strain of Subdoligranulum—Subdoligranulum didolesgii strain D8 (also referred to as isolate 7 throughout this disclosure)—was identified as being sufficient to cause rheumatoid arthritis (RA) or to worsen its disease course and effects on involved tissues.

[0007] As shown herein, S. didolesgii strain D8 is present in the feces of individuals at risk of RA and in individuals with early RA. Accordingly, the presence and/or abundance of Subdoligranulum didolesgii strain D8 in a human subject, such as in a fecal sample or other biological sample disclosed herein, can be used as a diagnostic indicator for RA, and as a predictive indicator for risk of RA onset. The present disclosure is directed to methods for diagnosing a subject with RA and for identifying a subject at risk of developing RA. The methods comprise detecting the presence or absence of Subdoligranulum didolesgii strain D8, in a biological sample of a subject. The methods advantageously permit early therapeutic action that may contribute to the slowing or prevention of tissue damage caused by RA. The skilled artisan will recognize other benefits of the disclosed methods and materials.

### BRIEF DESCRIPTION OF THE DRAWINGS

[0008] FIGS. 1A, 1B, and 1C depict data demonstrating that Subdoligranulum isolate 7 is detectable in the feces of individuals in the at-risk period and early stages of RA. FIG. 1A shows a standard curve created by spiking a human fecal sample with known quantities (colony forming units (CFU)/ml) of Subdoligranulum isolate 7 (designated Subdoligranulum didolesgii strain D8) The curve ranges from 1×10⁹ CFU of isolate 7 per 100 mg of feces to 0 CFU of isolate 7, with a limit of detection set at 1×10⁵ CFU per 100 mg of feces. A line of best fit was set for regression analysis (R²=0.9982). FIG. 1B shows qPCR analysis for the presence of isolate 7 in feces from healthy controls (n=12), individuals at-risk for RA (n=12), individuals with early RA (n=12) or specific pathogen-free (SPF) mice (n=12). The number and percentage of samples above the limit of detection for the assay is displayed by group (***, P<0.001, Chi-square test). FIG. 1C shows the results of a regression analysis performed utilizing the line of best fit for the assay to determine the estimated CFUs of isolate 7 in the positive samples. The mean CFUs per 100 mg feces is displayed ±SEM for all positive samples (n=4), for positive samples from individuals at-risk for RA (n=2) and for positive samples for individuals with early RA (n=2).

[0009] FIG. 2 is a table of characteristics of human fecal samples for Subdoligranulum isolate 7-specific qPCR data shown in FIG. 1.

[0010] FIG. 3 depicts estimated percentage of isolate 7 out of total bacterial load in human fecal samples from those individuals listed in FIG. 2. The estimated percentage of total bacteria per 100 mg feces that is isolate 7 was estimated for each positive sample, based on a previously published estimate of total CFUs of bacteria per fecal weight (Stephen, 1980, J Med Microbiol 13:45-56). The mean percentage of bacteria that are isolate 7 is displayed ±SEM for all positive samples (n=4), for positive samples from individuals at risk for RA (n=2), and for positive samples for individuals with early RA (n=2).

[0011] FIG. 4 provides a summary of the demographics of three groups of human subjects: healthy controls, individuals at-risk for RA, and individuals with early RA for the data shown in FIGS. 5 and 6. Kruskal-Wallis and Mann-Whitney testes were used for 3- and 2-way comparisons of continuous data, respectively. Categorical data comparisons were performed using Chi-square or Fisher's exact test. Correlations were performed using Spearman's rank correlation coefficient.

[0012] FIG. 5 shows the fecal concentration of S. dido 7 (in ng/μL) significantly differed across study three groups by Kruskal-Wallis test (p-0.02). After adjustment for multiple comparisons, the At-Risk group had a significantly higher fecal concentration of S. dido 7 compared to the control group by Mann-Whitney test (p=0.024).

[0013] FIG. 6 shows Spearman correlations between three biomarkers and subject age and BMI with fecal concentration of S. dido 7.

### DETAILED DESCRIPTION

[0014] In the following sections, various compositions and methods are described to detail various embodiments. Practicing the various embodiments does not require the employment of all the specific details outlined herein, but rather concentrations, times, and other specific details may be modified. In some cases, well known methods or components have not been included in the description.

[0015] A “subject” means any individual having rheumatoid arthritis (RA), having symptoms of RA, or at risk for developing RA. A subject may be human or non-human, and may include, for example, animals or species used as “model systems” for research purposes, such as a mouse model. The subject may be a human patient having RA or at risk of developing RA.

[0016] As used herein, “at-risk of developing RA” is defined as an individual that is a first-degree relative (FDR) of a patient with RA or an individual with preclinical RA. “Preclinical RA” refers to the presence of positive levels of circulating RA-specific autoantibodies, i.e., serum anti-cyclic citrullinated peptide positive (CCP+) and/or RF positive (RF+) and/or other antibodies to modified protein antigens (AMPA) and/or biomarkers that define the preclinical state of seronegative RA. Circulating RA-specific autoantibodies refers to serum anti-CCP3/anti-CCP3.1 positive and/or ≥2 RF isotypes.

[0017] As used herein, “having RA” is defined as an individual diagnosed using American College of Rheumatology (ACR) 1987 and/or ACR European League Against Rheumatism (EULAR) 2010 classification criteria; such criteria include exhibiting clinical symptoms and clinical signs and biomarkers of rheumatoid arthritis. As used herein, “early RA” refers to an individual within one year of RA diagnosis.

[0018] The present disclosure provides methods for identifying subjects at risk of developing RA, having pre-RA, having preclinical RA, having clinically suspect arthralgia (CSA), having early RA, or having RA. Such methods generally include detecting the presence or absence of the disclosed Subdoligranulum sp. nov. in the subject, with the presence of the Subdoligranulum didolesgii strain D8 being linked to a risk of developing RA or indicative of pre-RA, early RA, or RA in the subject. Also provided are methods for preventing development and/or progression of RA in a subject, or for treating RA in a subject. Such methods generally involve administering to a subject in need of treatment one or more therapeutic agents.

[0019] As used herein, “treat” in reference to a condition means: (1) to ameliorate or prevent the condition or one or more of the biological manifestations of the condition, (2) to interfere with (a) one or more points in the biological cascade that leads to or is responsible for the condition or (b) one or more of the biological manifestations of the condition, (3) to alleviate one or more of the symptoms or effects associated with the condition, and/or (4) to slow the progression of the condition or one or more of the biological manifestations of the condition. The terms “prevent,” “preventing,” and the like are to be understood to refer to a method of blocking the onset of disease and/or its attendant symptoms. “Prevent” also encompasses delaying or otherwise impeding the onset of a disease and/or its attendant symptoms.

[0020] As used herein, “therapeutically effective amount” in reference to an agent means an amount of the agent sufficient to treat the subject's condition but low enough to avoid serious side effects at a reasonable benefit/risk ratio within the scope of sound medical judgment. The safe and effective amount of an agent will vary with the particular agent chosen (e.g. consider the potency, efficacy, and half-life of the compound); the route of administration chosen; the condition being treated; the severity of the condition being treated; the age, size, weight, and physical condition of the patient being treated; the medical history of the patient to be treated; the duration of the treatment; the nature of concurrent therapy; the desired therapeutic effect; and like factors, but can nevertheless be determined by the skilled artisan.

[0021] The inventors previously identified a specific bacterial strain in the family Ruminococcus genus Subdoligranulum that is targeted by autoantibodies of individuals at risk for RA and those with classified RA. The Subdoligranulum sp. nov. and, in particular, Subdoligranulum didolesgii strain D8, is demonstrated herein as a biomarker of risk of RA or early RA. The strain, designated Subdoligranulum didolesgii strain D8, is maintained in the lab of inventor Kuhn and was deposited with the ATCC Patent Depository under the Budapest Treaty (10801 University Blvd, Manassas, VA 20110), on 9 Nov. 2021, with the ATCC Patent Deposit Designation No. PTA-126891. A genome contig of S. didolesgii strain D8 is provided in SEQ ID NO: 1. Two specific regions of the genome contig are provided: SEQ ID NO: 2 (referred to herein as “Region A”) and SEQ ID NO: 3 (referred to herein as “Region B”), as follows:

Region A (233 bp):
(SEQ ID NO: 2)
atttaaaataaataaatataatggaatagatgtattaaaaagaaatataa
ctaccgaaaacacacacataaacacttaatagtattttataactatcgag
tgggaatgatatcacactcgcctgaaagccagtaaccgtgcgggttacac
cgttctggatatatcttgtggcaacgttttggcaacacctgcaacataaa
ttgtattgttccataaatatagagctaactgaa
Region B (1443 bp):
(SEQ ID NO: 3)
ttgaatagagttatcttaatattatttcttttagatttgtttgtatcaac
atgctcttttctaagttgaattatattattactgtctgatgtaactagaa
cagttataacagctatcgaaaatgataacaatatagcaattgaatttatt
tgaatgtctataaatgattgaaacaacttaggtaagtatattttatctct
agacagaattacaatcaaagtaagcactaaagcaattaaccctgagatta
acatacctacccatattttgtccatatatttgtaataatcgtacaccggt
aatagtatagttttttttacaaatgctttaaacctcaacactttcacctc
attccaattttaattgttctaataattgctgagccttttgaaagaagtca
gcgctgtctacctcgttagtatcagatgtagtttcaacaataattttttc
ttttttcttaagttgttccgtatctaaaattgtatctccacctgatttta
cacataatctctttacttcattctcgttattatcaataagattataatat
ctctttatagcatctttagatatatatggactttttcgtccctttcgttt
aaaaataatatcaacatattcagacatatcatctctatcagcaaattgta
aatacttatcatcaagagaatttctttcaacagttaactttaaaagagta
aacttttttgcaatattaagtttagctaaaaacccttcatccggaataaa
atcactcgaaaaactatacctatactcatgattactaatatctgcaaaat
ttttcattttatgatataaataatttacaatttgacttattcctataccg
ttataatttttttcaaacatacataaaaatgtattacaccccttattatg
tctaatacataaatgagtgcgttcttcatcaccatcaaattcacctttga
gtattcctaaattatccatagttgaattatttcgaacatttcttctataa
ttatacttaagtgacttaaagattatattataatttctgttatccaatgc
ctcaaaagagtccatccatagagtcttatttttatttggatattctattc
ttctttcgaccaatgtttggttagacaaattattcattgcatcaacaaaa
aaaggtataaaatcctcaatagtaccttctggtaaatcaggcgaagtagc
cgtaatagttaaatttaagtaataaaaaccgacagagacatttttattca
tacatatatcctccaaattaacaaaatattatttatctagataatacaat
attttaaaataaatgtcaatatatgtaaaatatatcttaaactctataaa
atatttattatagtacattatataaccaatcttgtgtcagtgcgtgccaa
aaaaataaaggcgtaacaaatttatttgttctgcccttactat

[0022] With regard to S. didolesgii strain D8, the term “polynucleotide” as used in accordance with the present disclosure relates to a polynucleotide comprising a nucleic acid sequence of SEQ ID NO: 1 or a variant of SEQ ID NO: 1, a nucleic acid sequence of SEQ ID NO: 2 or a variant of SEQ ID NO: 2, or a nucleic acid sequence of SEQ ID NO: 3 or a variant of SEQ ID NO: 3. The polynucleotide variants, preferably, comprise a nucleic acid sequence characterized in that the sequence can be derived from SEQ ID NO: 1, 2, or 3 by at least one nucleotide substitution, addition and/or deletion. Variants also encompass polynucleotides comprising a nucleic acid sequence which is capable of hybridizing to the aforementioned specific nucleic acid sequences, preferably, under stringent hybridization conditions. These stringent conditions are known to the skilled worker and can be found in Current Protocols in Molecular Biology, John Wiley & Sons, N. Y. (1989), 6.3.1-6.3.6. A preferred example for stringent hybridization conditions are hybridization conditions in 6× sodium chloride/sodium citrate (=SSC) at approximately 45° C., followed by one or more wash steps in 0.2×SSC, 0.1% SDS at 50 to 65° C. The skilled worker knows that hybridization conditions differ depending on the type of nucleic acid and, for example when organic solvents are present, the temperature and concentration of the buffer.

[0023] Percent identity values are generally calculated over the entire nucleic acid sequence region. A series of programs based on a variety of algorithms is available to the skilled worker for comparing different sequences.

[0024] A mathematical algorithm useful for comparing two sequences is the algorithm of Karlin and Altschul (1990, Proc. Natl. Acad. Sci. USA 87:2264-2268), modified as in Karlin and Altschul (1993, Proc. Natl. Acad. Sci. USA 90:5873-5877). This algorithm is incorporated into the NBLAST and XBLAST programs of Altschul, et al. (1990, J. Mol. Biol. 215:403-410), and can be accessed, for example at the National Center for Biotechnology Information (NCBI) world wide web site having the universal resource locator “www.ncbi.nlm.nih.gov/BLAST/”. BLAST nucleotide searches can be performed with the NBLAST program (designated “blastn” at the NCBI web site), using the following parameters: gap penalty=5; gap extension penalty=2; mismatch penalty=3; match reward=1; expectation value 10.0; and word size=11 to obtain nucleotide sequences having sequence identity to a nucleic acid described herein.

[0025] Percent identity between two nucleotide sequences may be determined using the needle program in the EMBOSS software package (EMBOSS: The European Molecular Biology Open Software Suite, Rice, P., Longden, I., and Bleasby, A., Trends in Genetics 16 (6), 276-277, 2000), using the EDNAFULL scoring matrix and a gap opening penalty of 16, 14, 12, 10, 8, 6, or 4 and a gap extension penalty of 0.5, 1, 2, 3, 4, 5, or 6.

[0026] To obtain gapped alignments for comparison purposes, Gapped BLAST can be utilized as described in Altschul et al. (1997, Nucleic Acids Res. 25:3389-3402). Alternatively, PSI-Blast or PHI-Blast can be used to perform an iterated search which detects distant relationships between molecules (id.) and relationships between molecules which share a common pattern. When utilizing BLAST, Gapped BLAST, PSI-Blast, and PHI-Blast programs, the default parameters of the respective programs (e.g., XBLAST and NBLAST) can be used. See ncbi.nlm.nih.gov.

[0027] The percent identity between two sequences can be determined using techniques similar to those described above, with or without allowing gaps. In calculating percent identity, typically exact matches are counted.

[0028] Variants encompassed by the present disclosure include polynucleotides comprising nucleic acid sequences which are at least 50%, at least 55%, at least 60%, at least 65%, at least 70%, at least 75%, at least 80%, at least 85%, at least 90%, at least 91%, at least 92%, at least 93%, at least 94%, at least 95%, at least 96%, at least 97%, at least 98%, at least 99%, at least 99.1%, at least 99.2%, at least 99.3. at least 99.4%, at least 99.5%, at least 99.6%, at least 99.7%, at least 99.75%, at least 99.8%, at least 99.85%, or at least 99.9% identical to SEQ ID NO: 1, 2 or 3. Variants encompassed by the present disclosure have up to about 25,000 nucleotide differences (e.g., substitutions, additions and/or deletions) compared to SEQ ID NO: 1. Variants encompassed by the present disclosure have up to 20,000 nucleotide differences compared to SEQ ID NO: 1, up to 10,000, up to 7500, up to 7525, up to 7000, up to 6500, up to 6000, up to 5500, up to 5000, up to 4500, up to 4000, up to 3500, up to 3000, up to 2500, up to 2000, up to 1500, or up to 1000 nucleotide differences compared to SEQ ID NO: 1. Variants encompassed by the present disclosure have up to about 50 nucleotide differences (e.g., substitutions, additions and/or deletions) compared to SEQ ID NO: 2. Variants encompassed by the present disclosure have up to 35 nucleotide differences compared to SEQ ID NO: 2, up to 25, up to 20, up to 19, up to 16, up to 14, up to 12, up to 10, up to 7, up to 5, up to 3, up to 2, up to 3000, or up to 1 nucleotide differences compared to SEQ ID NO: 2. Variants encompassed by the present disclosure have up to about 30 nucleotide differences (e.g., substitutions, additions and/or deletions) compared to SEQ ID NO: 3. Variants encompassed by the present disclosure have up to 225 nucleotide differences compared to SEQ ID NO: 3, up to 200, up to 150, up to 145, up to 130, up to 115, up to 100, up to 85, up to 70, up to 60, up to 45, up to 30, up to 15, up to 10, up to 8, up to 5, or up to 2 nucleotide differences compared to SEQ ID NO: 3.

[0029] Variants encompassed include Subdoligranulum didolesgii strains comprising nucleic acid sequences which are at least 50%, at least 55%, at least 60%, at least 65%, at least 70%, at least 75%, at least 80%, at least 85%, at least 90%, at least 91%, at least 92%, at least 93%, at least 94%, at least 95%, at least 96%, at least 97%, at least 98%, at least 99%, at least 99.1%, at least 99.2%, at least 99.3. at least 99.4%, at least 99.5%, at least 99.6%, at least 99.7%, at least 99.75%, at least 99.8%, at least 99.85%, or at least 99.9% identical to SEQ ID NO: 1, 2 or 3.

[0030] Variants encompassed include Subdoligranulum didolesgii strains comprising nucleic acid sequences which have up to about 25,000 nucleotide differences compared to SEQ ID NO: 1. Variants encompassed by the present disclosure include Subdoligranulum didolesgii strains having up to 20,000 nucleotide differences compared to SEQ ID NO: 1, up to 10,000, up to 7500, up to 7525, up to 7000, up to 6500, up to 6000, up to 5500, up to 5000, up to 4500, up to 4000, up to 3500, up to 3000, up to 2500, up to 2000, up to 1500, or up to 1000 nucleotide differences compared to SEQ ID NO: 1. Variants encompassed by the present disclosure include Subdoligranulum didolesgii strains having up to 20,000 nucleotide substitutions compared to SEQ ID NO: 1, up to 10,000, up to 7500, up to 7525, up to 7000, up to 6500, up to 6000, up to 5500, up to 5000, up to 4500, up to 4000, up to 3500, up to 3000, up to 2500, up to 2000, up to 1500, or up to 1000 nucleotide substitutions compared to SEQ ID NO: 1.

[0031] Variants encompassed by the present disclosure include Subdoligranulum didolesgii strains having up to about 50 nucleotide differences compared to SEQ ID NO: 2. Variants encompassed by the present disclosure include Subdoligranulum didolesgii strains having up to 35 nucleotide differences compared to SEQ ID NO: 2, up to 25, up to 20, up to 19, up to 16, up to 14, up to 12, up to 10, up to 7, up to 5, up to 3, up to 2, up to 3000, or up to 1 nucleotide differences compared to SEQ ID NO: 2. Variants encompassed by the present disclosure include Subdoligranulum didolesgii strains having up to about 50 nucleotide substitutions compared to SEQ ID NO: 2. Variants encompassed by the present disclosure include Subdoligranulum didolesgii strains having up to 35 nucleotide substitutions compared to SEQ ID NO: 2, up to 25, up to 20, up to 19, up to 16, up to 14, up to 12, up to 10, up to 7, up to 5, up to 3, up to 2, up to 3000, or up to 1 nucleotide substitutions compared to SEQ ID NO: 2.

[0032] Variants encompassed by the present disclosure include Subdoligranulum didolesgii strains having up to about 30 nucleotide differences compared to SEQ ID NO: 3. Variants encompassed by the present disclosure include Subdoligranulum didolesgii strains having up to 225 nucleotide differences compared to SEQ ID NO: 3, up to 200, up to 150, up to 145, up to 130, up to 115, up to 100, up to 85, up to 70, up to 60, up to 45, up to 30, up to 15, up to 10, up to 8, up to 5, or up to 2 nucleotide differences compared to SEQ ID NO: 3. Variants encompassed by the present disclosure include Subdoligranulum didolesgii strains having up to about 30 nucleotide substitutions compared to SEQ ID NO: 3. Variants encompassed by the present disclosure include Subdoligranulum didolesgii strains having up to 225 nucleotide substitutions compared to SEQ ID NO: 3, up to 200, up to 150, up to 145, up to 130, up to 115, up to 100, up to 85, up to 70, up to 60, up to 45, up to 30, up to 15, up to 10, up to 8, up to 5, or up to 2 nucleotide substitutions compared to SEQ ID NO: 3. A variant strain may comprise at least one target antigen described herein. Alternatively or additionally, a variant strain may comprise at least one target antigen described herein. Alternatively or additionally, a variant strain may comprise at least one property selected from: causes local intestinal isolated lymphoid follicles (ILF) formation, stimulates T cell activation, induces development of RA-related autoantibodies, and induces joint swelling.

[0033] In methods of this disclosure, the presence of S. didolesgii strain D8, or a variant thereof, in a subject, identifies the subject as being at risk of developing rheumatoid arthritis, such as having preclinical RA, or as having RA, such as early RA.

Methods of Detecting S. didolesgii Strain D8

[0034] Provided herein are methods for detecting the presence of S. didolesgii strain D8 in a biological sample obtained from a subject. The inventors have created a method of detecting S. didolesgii Strain D8 with high specificity/discrimination. The method distinguishes between D8 and strain H3; strain H3 is another S. didolesgii Strain that is commonly found in fecal samples of individuals who have RA but is not suitable as a diagnostic biomarker. In addition, the method has unexpectedly high sensitivity in detecting S. didolesgii Strain D8 at an abundance of 0.0002% in feces. High specificity/discrimination is important to the use of strain D8 as a biomarker for risk assessment and diagnostic use.

[0035] Accordingly, a method for diagnosing rheumatoid arthritis (RA) in a subject is provided. The method comprises a) obtaining a biological sample from the subject; b) detecting presence or absence of Subdoligranulum didolesgii strain D8 in the biological sample, wherein the bacteria comprises SEQ ID NO: 2 (Region A) and/or SEQ ID NO: 3 (Region B), and c) diagnosing the subject with RA when Subdoligranulum didolesgii strain D8 bacteria is detected in the biological sample. Also provided is a method for diagnosing risk of rheumatoid arthritis (RA) in a subject. The method comprises a) obtaining a biological sample from the subject; b) detecting presence or absence of Subdoligranulum didolesgii strain D8 in the biological sample, wherein the bacteria comprises SEQ ID NO: 2 (Region A) and/or SEQ ID NO: 3 (Region B), and c) diagnosing the subject with RA when Subdoligranulum didolesgii strain D8 bacteria is detected in the biological sample. Detecting the presence of Subdoligranulum didolesgii strain D8 can be assessed relative to a control sample from a subject not diagnosed with RA and control sample from a subject not at risk of RA. Detection can also be a relative abundance of S. didolesgii Strain D8 above a threshold. Abundance may be assessed by assessing CFUs of S. didolesgii Strain D8 per weight or amount of biological sample. The threshold may be 2+SD (standard deviation) above the mean value for controls.

[0036] The presence of S. didolesgii strain D8 can be detected utilizing a genomic approach, where bacterial genomic DNA isolated from a biological sample is analyzed to determine its genetic identity. The genomic approach can involve, for example, PCR analysis or whole genome sequencing (WGS). Where WGS sequencing is utilized, methods can include a PCR step or a multiple displacement amplification step.

[0037] The presence of S. didolesgii strain D8 can be detected by PCR analysis, such as quantitative PCR (qPCR). As disclosed herein, thirty (30) different primer pairs were designed (10 sets for Region A and 20 sets for Region B) and tested for detection of S. didolesgii strain D8 in a biological sample (feces). Only three primer pairs had detection above the control. These three primer pairs are: primer pair 8, primer pair 7, and primer pair 16. Each of these three primer pairs are shown in the table below and for each primer pair, the forward primer is the plus template strand and the reverse primer is the minus template strand. Accordingly, the PCR analysis may include the use of primer pair 8, or the use of primer pair 7, or the use of primer pair 16. The PCR analysis may include the use of primer pair 8 and one of primer pair 7 and primer pair 16. The PCR analysis may include the use of primer pair 8, primer pair 7, and primer pair 16.

| Sequence | SEQ ID | | | |
|---|---|---|---|---|
| (5′->3′) | NO: | Length | Start | Stop |

PRIMER PAIR 8 (Region A)

| | | | | | |
|---|---|---|---|---|---|
| Forward | ACCGAAAACACAC | 4 | 24 | 53 | 76 |
| primer | ACATAAACACT | | | | |
| Reverse | GGTTACTGGCTTT | 5 | 20 | 137 | 118 |
| primer | CAGGCGA | | | | |

| | |
|---|---|
| Product | 85 |
| length | |

PRIMER PAIR 7 (Region A)

| | | | | | |
|---|---|---|---|---|---|
| Forward | GGGAATGATATCA | 6 | 22 | 102 | 123 |
| primer | CACTCGCCT | | | | |
| Reverse | TTGCCAAAACGTT | 7 | 21 | 185 | 165 |
| primer | GCCACAAG | | | | |

| | |
|---|---|
| Product | 84 |
| length | |

PRIMER PAIR 16 (Region B)

| | | | | | |
|---|---|---|---|---|---|
| Forward | GTCAGCGCTGTCT | 8 | 20 | 397 | 416 |
| primer | ACCTCGT | | | | |
| Reverse | ACGGCTACTTCGC | 9 | 19 | 1203 | 1185 |
| primer | CTGATT | | | | |

| | |
|---|---|
| Product | 807 |
| length | |

[0038] Direct sequence analysis can be used to detect a bacterial nucleic acid (e.g., a genome) of interest. A sample including DNA or RNA can be used, and PCR or other appropriate methods can be used to amplify all or a fragment of the nucleic acid, and/or its flanking sequences, if desired. The bacterial nucleic acid, or a fragment thereof, is determined, using standard methods.

[0039] Presence of S. didolesgii strain D8 can be detected by identifying the presence in the biological sample of S. didolesgii strain D8 genomic DNA. A contig representing the genomic sequence of S. didolesgii strain D8 is provided in SEQ ID NO: 1. An alignment of experimental sequences to SEQ ID NO: 1 can reveal the presence of S. didolesgii strain D8 in the sample. Experimental sequences may be aligned to SEQ ID NO: 2 or 3. S. didolesgii strain D8 is maintained in the lab of inventor Kuhn and was deposited with the ATCC Patent Depository under the Budapest Treaty (10801 University Blvd, Manassas, VA 20110), on 9 Nov. 2021. Those of skill in the art will be able to compare the deposited S. didolesgii strain D8 to bacteria—and their genomes—identified in biological samples.

[0040] Arrays of oligonucleotide probes complementary to target microbial nucleic acid sequences can be used to detect and identify microbial nucleic acids. The oligonucleotide probes may be complementary to sequences of Region A (SEQ ID NO: 2) and/or sequences of Region B (SEQ ID NO: 3).

[0041] Biological samples can include, for example, fecal samples, serum, plasma, peripheral blood cells, bone marrow, tissues including synovium or other joint-related tissues such as synovial fluid, sputum, rectal swabs, intestinal biopsies, along with samples from other mucosal or cutaneous sites. The biological sample may be a fecal sample.

[0042] Hybridization methods, such as Southern analysis, Northern analysis, or in situ hybridizations, can be used (see Current Protocols in Molecular Biology, Ausubel, F. et al., eds., John Wiley & Sons, including all supplements). For example, the presence of nucleic acid from a particular type of bacteria (e.g., S. didolesgii strain D8) can be determined by hybridization of nucleic acid to a nucleic acid probe. A “nucleic acid probe,” as used herein, can be a DNA probe or an RNA probe. The nucleic acid probe can be, for example, a full-length nucleic acid molecule, or a portion thereof, such as an oligonucleotide of at least 15, 30, 50, 100, 250 or 500 nucleotides in length and sufficient to specifically hybridize under stringent conditions to appropriate target RNA or DNA. Appropriate target sequences can include Region A (SEQ ID NO: 2), or fragments thereof, and/or Region B (SEQ ID NO: 3), or fragments thereof. The hybridization sample is maintained under conditions which are sufficient to allow specific hybridization of the nucleic acid probe to RNA or DNA. Specific hybridization can be performed under high stringency conditions or moderate stringency conditions, as appropriate. The hybridization conditions for specific hybridization are high stringency. More than one nucleic acid probe can also be used concurrently in this method. Specific hybridization of any one of the nucleic acid probes is indicative of the presence of the S. didolesgii bacterial strain of interest, as described herein.

[0043] Also provided are methods for preparing a sample fraction for detection of S. didolesgii strain D8 in a subject. Such methods generally include contacting a sample (e.g., fecal sample, fecal swab, or intestinal biopsy) with one or more monoclonal antibodies or one or more monoclonal antibody fragments having a variable region as described in WO 2022/099317. After contacting the sample with the one or more monoclonal antibodies or one or more monoclonal antibody fragments, the resulting fraction will include an increased relative abundance of bacteria from Lachnospiraceae, Ruminococcaceae, or both Lachnospiraceae and Ruminococcaceae in the sample fraction. Such methods can be set up similarly to a traditional immunoprecipitation assay, which will provide for the “pull down” of the target bacteria. After achieving the enriched sample fraction, the bacteria can be released from one or more monoclonal antibodies or one or more antibody fragments.

### Methods of Diagnosis

[0044] This disclosure provides methods of diagnosing a subject as having, or as being at risk for developing, rheumatoid arthritis. A subject can be diagnosed as having, or as being at risk for developing, rheumatoid arthritis by detecting the presence of S. didolesgii strain D8 in a subject. Presence of S. didolesgii strain D8 can be detected in accordance with the methods described herein.

[0045] The methods for diagnosing a subject as having, or as being at risk for developing, rheumatoid arthritis may further include effectuating a treatment regimen on a subject diagnosed as having, or at risk of having, RA. The method can include diagnosing a subject with RA or at risk of developing RA based upon the detection of S. didolesgii strain D8 in a subject, and administering a treatment regimen described herein to the subject to treat or otherwise prevent RA in the subject.

### Treatment Methods

[0046] Methods for treating rheumatoid arthritis in a subject, or ameliorating at least one symptom of rheumatoid arthritis in a subject, as known in the art. Methods of treatment can be executed by administering to a subject an effective amount of an agent known for treating RA.

[0047] These agents include but are not limited to non-steroidal anti-inflammatory drugs, corticosteroids, disease-modifying antirheumatic drugs, and biologic response modifiers.

[0048] These agents include but are not limited to non-steroidal anti-inflammatory drugs, corticosteroids, disease-modifying antirheumatic drugs, and biologic response modifiers.

[0049] Examples of suitable non-steroidal anti-inflammatory drugs include: ibuprofen; naproxen sodium; celecoxib; diclofenac; fenoprofen; flurbiprofen; indomethacin; ketorolac; mefenamic acid; meloxicam; oxaprozin; piroxicam; and sulindac.

[0050] Examples of suitable corticosteroids include: prednisone; bethamethasone; and prednisolone; triamcinolone; methylprednisolone; and dexamethasone.

[0051] Examples of suitable disease-modifying antirheumatic drugs include: methotrexate; leflunomide; hydroxychloroquine; and sulfasalazine.

[0052] Examples of suitable biologic response modifiers include: abatacept and biosimilars thereof; adalimumab and biosimilars thereof; anakinra and biosimilars thereof; baricitinib; certolizumab and biosimilars thereof; etanercept and biosimilars thereof; golimumab and biosimilars thereof; infliximab and biosimilars thereof; rituximab and biosimilars thereof; sarilumab and biosimilars thereof; tocilizumab and biosimilars thereof; and tofacitinib.

[0053] The therapeutic agents can be administered prophylactically or therapeutically to subjects at risk of (or susceptible to) developing RA, those presenting with preclinical RA, or those subjects diagnosed with RA. Prophylactic administration occurs prior to the manifestation of overt clinical symptoms of RA, such that RA is prevented or alternatively delayed in its progression slow the disease. Where a cure or prevention of the RA in a subject diagnosed to be at risk of developing RA, the goal of prophylactic treatment is to control symptoms and help the subject maintain a normal quality of life. Prevention can occur at primary, secondary and tertiary prevention levels. While primary prevention avoids the development of a disease, secondary and tertiary levels of prevention encompass activities aimed at preventing the progression of a disease and the emergence of symptoms as well as reducing the negative impact of an already established disease by restoring function and reducing disease-related complications.

[0054] Administration of the agents can be achieved in several ways using methods known in the art, including systemic administration (e.g., enteral or parenteral administration), intradermal delivery, intramuscular delivery, subcutaneous delivery, inhalation, and intranasal delivery.

[0055] The agents can be administered to a subject alone, or in conjunction with one or more agents, such as those traditionally utilized in the treatment of RA.

[0056] The agents may be administered to a subject as frequently as several times daily, or they may be administered less frequently, such as once a day, once a week, once every two weeks, once a month, or even less frequently, such as once every several months or even once a year or less. The frequency of the dose will be readily determinable by the skilled artisan and will depend upon any number of factors, such as, but not limited to, the type and severity of the disease being treated.

### Kits

[0057] Also provided are kits useful in carrying out the methods of this disclosure. Such kits comprise components useful in any of the methods described herein, including for example, primer pairs for qPCR, hybridization probes or primers (e.g., labeled probes or primers), reagents for detection of labeled molecules, means for amplification of nucleic acids, means for analyzing a nucleic acid sequence, antibodies, and instructional materials. For example, a kit may comprise components useful for analysis of a bacterial nucleic acid of interest present in a biological sample obtained from a subject. The kit may comprise components for detecting one or more of the bacterial nucleic acids of interest present in a biological sample derived from a subject. The kit may comprise primer pair 8 and optionally primer pair 7 and/or primer pair 16, as disclosed herein, for detecting bacterial nucleic acid of Subdoligranulum didolesgii strain D8 present in a biological sample derived from a subject.

### EXAMPLES

[0058] The materials, methods, and embodiments described herein are further defined in the following Examples. Certain embodiments are defined in the Examples herein. These Examples, while demonstrating certain embodiments, are given by way of illustration only. From the disclosure herein and these Examples, one skilled in the art can ascertain the essential characteristics of this invention, and without departing from the spirit and scope thereof, can make various changes and modifications of the invention to adapt it to various usages and conditions.

[0059] As described in the inventors' copending application (PCT/US2021/072293, filed 8 Nov. 2021; WO 2022/099317, published 12 May 2022), to investigate immune responses to Lachnospiraceae and Ruminococcaceae in RA, primary bacterial isolates from an individual with >40% abundance of these taxa in their feces were established. A total of 50 isolates were established, of which seven were identified as Lachnospiraceae/Ruminococcaceae by qPCR (isolates 1-7), and five were confirmed as pure isolates by 16S rRNA sequencing (isolates 1, 3-5, and 7). These five isolates underwent whole genome sequencing. The five isolates were narrowed to two candidates (isolates 1 and 7) for further study due to their differing abilities to induce joint swelling in monocolonized mice. Isolate 1 was designated Subdoligranulum didolesgii strain H3 and isolate 7 was designated Subdoligranulum didolesgii strain D8. Of these two candidates, Subdoligranulum didolesgii strain D8 (isolate 7), was identified as sufficient to cause rheumatoid arthritis (RA) or to worsen its disease course and effects on involved tissues.

### Example 1: Subdoligranulum Isolate 7 Specific qPCR

[0060] To determine the biological relevance of Subdoligranulum isolate 7 (S. didolesgii strain D8) in humans at-risk for early RA (<1 year from diagnosis), regions of the genome unique to isolate 7 and not present in isolate 1 were used to design a specific qPCR assay testing for the presence of isolate 7.

[0061] Two regions of genomic DNA present in Subdoligranulum isolate 7, but absent in isolate 1, were identified: Region A (SEQ ID NO: 2), supra and Region B (SEQ ID NO: 3), supra. From these regions, the NCBI primer design tool was utilized to generate 30 sets of potential isolate-7-specific primers; 10 primer sets were generated for Region A, as follows:

| | | | | |
|---|---|---|---|---|
| | Seq ID | | | |
| Sequence (5′->3′) | No. | Length | Start | Stop |

Primer pair 1

| | | | | | |
|---|---|---|---|---|---|
| Forward primer | TCGCCTGAAAGCCAGTAACC | 10 | 20 | 118 | 137 |
| Reverse primer | AGGTGTTGCCAAAACGTTGC | 11 | 20 | 190 | 171 |

| | |
|---|---|
| Product length | 73 |

Primer pair 2

| | | | | | |
|---|---|---|---|---|---|
| Forward primer | ACTCGCCTGAAAGCCAGTAA | 12 | 20 | 116 | 135 |
| Reverse primer | GTTGCCAAAACGTTGCCACA | 13 | 20 | 186 | 167 |

| | |
|---|---|
| Product length | 71 |

Primer pair 3

| | | | | | |
|---|---|---|---|---|---|
| Forward primer | GCCTGAAAGCCAGTAACCGT | 14 | 20 | 120 | 139 |
| Reverse primer | GGTGTTGCCAAAACGTTGCC | 15 | 20 | 189 | 170 |

| | |
|---|---|
| Product length | 70 |

Primer pair 4

| | | | | | |
|---|---|---|---|---|---|
| Forward primer | TATCACACTCGCCTGAAAGCC | 16 | 21 | 110 | 130 |
| Reverse primer | GCCAAAACGTTGCCACAAGAT | 17 | 21 | 183 | 163 |

| | |
|---|---|
| Product length | 74 |

Primer pair 5

| | | | | | |
|---|---|---|---|---|---|
| Forward primer | CCTGAAAGCCAGTAACCGTG | 18 | 20 | 121 | 140 |
| Reverse primer | TATGTTGCAGGTGTTGCCAAA | 19 | 21 | 198 | 178 |

| | |
|---|---|
| Product length | 78 |

Primer pair 6

| | | | | | |
|---|---|---|---|---|---|
| Forward primer | ACTCGCCTGAAAGCCAGTAAC | 20 | 21 | 116 | 136 |
| Reverse primer | GTGTTGCCAAAACGTTGCC | 21 | 19 | 188 | 170 |

| | |
|---|---|
| Product length | 73 |

Primer pair 7

| | | | | | |
|---|---|---|---|---|---|
| Forward primer | GGGAATGATATCACACTCGCCT | 6 | 22 | 102 | 123 |
| Reverse primer | TTGCCAAAACGTTGCCACAAG | 7 | 21 | 185 | 165 |

| | |
|---|---|
| Product length | 84 |

Primer pair 8

| | | | | | |
|---|---|---|---|---|---|
| Forward primer | ACCGAAAACACACACATAAACACT | 4 | 24 | 53 | 76 |
| Reverse primer | GGTTACTGGCTTTCAGGCGA | 5 | 20 | 137 | 118 |

| | |
|---|---|
| Product length | 85 |

Primer pair 9

| | | | | | |
|---|---|---|---|---|---|
| Forward primer | GTAACCGTGCGGGTTACAC | 22 | 19 | 132 | 150 |
| Reverse primer | ATTTATGTTGCAGGTGTTGCCA | 23 | 22 | 201 | 180 |

| | |
|---|---|
| Product length | 70 |

Primer pair 10

| | | | | | |
|---|---|---|---|---|---|
| Forward primer | GCCTGAAAGCCAGTAACCG | 24 | 19 | 120 | 138 |
| Reverse primer | CAGGTGTTGCCAAAACGTTGC | 25 | 21 | 191 | 171 |

| | |
|---|---|
| Product length | 72 |

20 primer sets were generated for Region B, as follows:
Primer pair 1

| | | | | | |
|---|---|---|---|---|---|
| Forward primer | CAGCGCTGTCTACCTCGTTA | 26 | 20 | 399 | 418 |
| Reverse primer | ACGGCTACTTCGCCTGATTT | 27 | 20 | 1203 | 1184 |

| | |
|---|---|
| Product length | 805 |

Primer pair 2

| | | | | | |
|---|---|---|---|---|---|
| Forward primer | GCGCTGTCTACCTCGTTAGT | 28 | 20 | 401 | 420 |
| Reverse primer | CACGCACTGACACAAGATTGG | 29 | 21 | 1396 | 1376 |

| | |
|---|---|
| Product length | 996 |

Primer pair 3

| | | | | | |
|---|---|---|---|---|---|
| Forward primer | TGAGTGCGTTCTTCATCACCA | 30 | 21 | 914 | 934 |
| Reverse primer | TACGGCTACTTCGCCTGATT | 31 | 20 | 1204 | 1185 |

| | |
|---|---|
| Product length | 291 |

Primer pair 4

| | | | | | |
|---|---|---|---|---|---|
| Forward primer | CAGCGCTGTCTACCTCGTT | 32 | 19 | 399 | 417 |
| Reverse primer | TGGTGATGAAGAACGCACTCA | 33 | 21 | 934 | 914 |

| | |
|---|---|
| Product length | 536 |

Primer pair 5

| | | | | | |
|---|---|---|---|---|---|
| Forward primer | TCAGGCGAAGTAGCCGTAAT | 34 | 20 | 1187 | 1206 |
| Reverse primer | ACGCACTGACACAAGATTGG | 35 | 20 | 1395 | 1376 |

| | |
|---|---|
| Product length | 209 |

Primer pair 6

| | | | | | |
|---|---|---|---|---|---|
| Forward primer | ATCAGGCGAAGTAGCCGTAA | 36 | 20 | 1186 | 1205 |
| Reverse primer | GGCACGCACTGACACAAGAT | 37 | 20 | 1398 | 1379 |

| | |
|---|---|
| Product length | 213 |

Primer pair 7

| | | | | | |
|---|---|---|---|---|---|
| Forward primer | TCAGCGCTGTCTACCTCGTT | 38 | 20 | 398 | 417 |
| Reverse primer | ATTACGGCTACTTCGCCTGA | 39 | 20 | 1206 | 1187 |

| | |
|---|---|
| Product length | 809 |

Primer pair 8

| | | | | | |
|---|---|---|---|---|---|
| Forward primer | AATCAGGCGAAGTAGCCGTA | 40 | 20 | 1185 | 1204 |
| Reverse primer | GGCACGCACTGACACAAGA | 41 | 19 | 1398 | 1380 |

| | |
|---|---|
| Product length | 214 |

Primer pair 9

| | | | | | |
|---|---|---|---|---|---|
| Forward primer | GCGCTGTCTACCTCGTTAGTA | 42 | 21 | 401 | 421 |
| Reverse primer | ACGGCTACTTCGCCTGATTTA | 43 | 21 | 1203 | 1183 |

| | |
|---|---|
| Product length | 803 |

Primer pair 10

| | | | | | |
|---|---|---|---|---|---|
| Forward primer | TCAGCGCTGTCTACCTCGT | 44 | 19 | 398 | 416 |
| Reverse primer | TACGGCTACTTCGCCTGATTT | 45 | 21 | 1204 | 1184 |

| | |
|---|---|
| Product length | 807 |

Primer pair 11

| | | | | | |
|---|---|---|---|---|---|
| Forward primer | GAGTGCGTTCTTCATCACCA | 46 | 20 | 915 | 934 |
| Reverse primer | TGGATGGACTCTTTTGAGGCA | 47 | 21 | 1068 | 1048 |

| | |
|---|---|
| Product length | 154 |

Primer pair 12

| | | | | | |
|---|---|---|---|---|---|
| Forward primer | TGAGTGCGTTCTTCATCACC | 48 | 20 | 914 | 933 |
| Reverse primer | CGGCTACTTCGCCTGATTTAC | 49 | 21 | 1202 | 1182 |

| | |
|---|---|
| Product length | 289 |

Primer pair 13

| | | | | | |
|---|---|---|---|---|---|
| Forward primer | AATCAGGCGAAGTAGCCGTAA | 50 | 21 | 1185 | 1205 |
| Reverse primer | GCACGCACTGACACAAGAT | 51 | 19 | 1397 | 1379 |

| | |
|---|---|
| Product length | 213 |

Primer pair 14

| | | | | | |
|---|---|---|---|---|---|
| Forward primer | TCAGCGCTGTCTACCTCGTTA | 52 | 21 | 398 | 418 |
| Reverse primer | GGTGATGAAGAACGCACTCA | 53 | 20 | 933 | 914 |

| | |
|---|---|
| Product length | 536 |

Primer pair 15

| | | | | | |
|---|---|---|---|---|---|
| Forward primer | AGCGCTGTCTACCTCGTTAGT | 54 | 21 | 400 | 420 |
| Reverse primer | TGGTGATGAAGAACGCACTC | 55 | 20 | 934 | 915 |

| | |
|---|---|
| Product length | 535 |

Primer pair 16

| | | | | | |
|---|---|---|---|---|---|
| Forward primer | GTCAGCGCTGTCTACCTCGT | 8 | 20 | 397 | 416 |
| Reverse primer | ACGGCTACTTCGCCTGATT | 9 | 19 | 1203 | 1185 |

| | |
|---|---|
| Product length | 807 |

Primer pair 17

| | | | | | |
|---|---|---|---|---|---|
| Forward primer | GTGCGTTCTTCATCACCATCA | 56 | 21 | 917 | 937 |
| Reverse primer | TCGCCTGATTTACCAGAAGGT | 57 | 21 | 1194 | 1174 |

| | |
|---|---|
| Product length | 278 |

Primer pair 18

| | | | | | |
|---|---|---|---|---|---|
| Forward primer | AAATCAGGCGAAGTAGCCGTA | 58 | 21 | 1184 | 1204 |
| Reverse primer | GGCACGCACTGACACAAG | 59 | 18 | 1398 | 1381 |

| | |
|---|---|
| Product length | 215 |

Primer pair 19

| | | | | | |
|---|---|---|---|---|---|
| Forward primer | TGGACTTTTTCGTCCCTTTCG | 60 | 21 | 577 | 597 |
| Reverse primer | TGATGGTGATGAAGAACGCAC | 61 | 21 | 937 | 917 |

| | |
|---|---|
| Product length | 361 |

Primer pair 20

| | | | | | |
|---|---|---|---|---|---|
| Forward primer | GGACTTTTTCGTCCCTTTCGT | 62 | 21 | 578 | 598 |
| Reverse primer | TTACGGCTACTTCGCCTGATTT | 63 | 22 | 1205 | 1184 |

| | |
|---|---|
| Product length | 628 |

[0062] DNA was extracted from Subdoligranulum isolates 7 and 1 as follows. Total bacterial genomic DNA extractions were performed using the QIAamp® Power Fecal DNA prep kit (Qiagen®, Germantown, MD) according to the manufacturer's instructions. Isolate 1 and 7 DNA were screened utilizing the primer sets and compared to a universal bacterial primer set, RpoB (global 16S bacterial primer; 5′->3′ rpoB1698 Forward: AACATCGGTTTGATCAAC (SEQ ID NO: 64) and rpoB2041 Reverse: CGTTGCATGTTGGTACCCAT (SEQ ID NO: 65))

[0063] Surprisingly, of the 30 primer pairs designed and tested, only three primer sets demonstrated a strong fold change expression over RpoB and isolate 1. These three primer sets were flagged for further use and characterization of sensitivity to detect a low relative abundance of Subdoligranulum isolate 7 in a fecal sample. Next, known quantities of isolate 7 were spiked into a human fecal sample that had previously not been identified as containing Subdoligranulum to create a standard curve. The curve ranged from 1×10⁹ CFU of isolate 7 per 100 mg human feces to 0 CFU of isolate 7 per 100 mg of human feces. The three primer sets of interest were utilized against this standard curve and compared to RpoB as a control. The best primer set was identified (primer pair 8) and the limit of detection of 1×10⁵ CFU of isolate 7 per 100 mg feces was established based on qPCR Ct versus CFUs of Isolate 7 (FIG. 1A). A line of best fit was established for the curve (R²=0.9982) and utilized for regression analysis of human and murine samples.

[0064] The qPCR assay demonstrates specificity towards isolate 7 and sensitivity down to 10,000 bacteria per 10 mg of fecal bacteria (FIG. 1A).

### Example 2: Subdoligranulum Isolate 7 is Detectable in the Feces of Individuals in the at-Risk Period and Early Stages of RA

[0065] The feces of healthy human control subjects (n=12), individuals at-risk for RA (n=12), and individuals with early RA (<1 year from diagnosis, n=12; FIG. 2) were screened for the presence of isolate 7 in 100 mg of feces. These samples were compared to the standard curve and through regression analysis, the CFUs of isolate 7 per 100 mg of fecal weight was established.

[0066] The prevalence of isolate 7 above the limit of detection was 16.7% in the at-risk and early RA groups, but 0% in healthy controls (P<0.001, FIG. 1B). The abundance of isolate 7 varied among the positive samples, with an average of 1.637×10⁷±3.059×10⁷ CFUs per positive sample (FIG. 1C).

[0067] Previous studies have estimated that 100 mg of fecal weight contains roughly 4.1×10¹⁰ bacteria (Stephen, 1980, J Med Microbiol 13:45-56), indicating that the positive samples from this study have an average of 0.04±0.07% abundance of isolate 7 in their microbiomes (FIG. 3).

[0068] Twelve (12) mice from our specific pathogen free colony were similarly tested for the presence of isolate 7. Isolate 7 was undetectable in the feces of all the mice (FIG. 1B). Thus, the presence of isolate 7 appears to be restricted to a subgroup of individuals at-risk for, and with, RA.

### Example 3: Prevalence and Comparison of the Fecal Concentration of S. dido7 Among Healthy Controls Vs. Individuals at-Risk and with Early RA

[0069] In this study, we sought to assess the prevalence and compare the fecal concentration of S. dido7 among healthy controls vs. individuals at-risk and with early RA and its association with CCP3 antibodies and biomarkers of intestinal permeability, zonulin and soluble CD14.

[0070] Stool and sera were prospectively collected from 3 groups: 1) ‘At-Risk’ human individuals, defined as those with positive CCP3 with no history of, nor current, IA (n=54), 2) individuals with CCP3(+) RA based on 2010 ACR/EULAR criteria within 12 months of diagnosis (n=5) and 3) controls without IA or RF/CCP3 positivity (n=32). Exclusion criteria included antibiotics in the 3 months prior to sample collection. Fecal DNA was extracted using a commercial kit (Qiagen). Quantitative PCR was used to create a standard curve using known concentrations of S. dido7 to allow for calculation of strain-specific fecal levels in individual samples. Serum CCP3 ELISA (Werfen) was used to measure CCP IgG. Serum ELISAs (Cusabio) were used to quantitate serum zonulin and soluble CD14.

[0071] Demographics of the three groups of human test subjects are summarized in FIG. 4. There were no significant differences across the groups apart from age. Fecal concentration of S. dido7 was 2.5-fold higher in At-Risk individuals and 3.1-fold higher in early RA individuals compared to controls (p-0.02; FIG. 5). Higher serum CCP3 levels significantly correlated with higher fecal S. dido 7 concentration (p=0.005; FIG. 6). Serum CD14 but not zonulin was significantly lower in At-Risk individuals and early RA individuals (p=0.008; FIG. 4). Higher zonulin significantly correlated with lower fecal S. dido7 concentration (p=0.002; FIG. 6). There was no significant correlation between fecal S. dido7 and serum soluble CD14 or age (FIG. 6).

[0072] Although embodiments have been described in detail with reference to examples above, it is understood that various modifications can be made without departing from the spirit of this disclosure, and would readily be known to the skilled artisan.

[0073] These data, along with the prior data demonstrating arthritogenic potential of this bacterial strain, suggest S. dido7 may play an important mechanistic role in a subset of individuals during development of CCP autoantibodies and subsequent RA.

[0074] These and other aspects disclosed herein, including the exemplary diagnostic methods, treatment methods, and uses, will be apparent from the teachings contained herein.

1. A method for diagnosing rheumatoid arthritis (RA) in a subject, the method comprising:
a) obtaining a biological sample from the subject;
b) detecting presence or absence of Subdoligranulum didolesgii strain D8 in the biological sample, wherein the bacteria comprises SEQ ID NO: 2 (Region A) and/or SEQ ID NO: 3 (Region B), and
c) diagnosing the subject with RA when Subdoligranulum didolesgii strain D8 bacteria is detected in the biological sample.

2. The method of claim 1, wherein the presence of Subdoligranulum didolesgii strain D8 is detected by polymerase chain reaction (PCR) analysis or sequencing.

3. The method of claim 1 or claim 2, wherein the presence of Subdoligranulum didolesgii strain D8 is detected by quantitative PCR (qPCR) analysis.

4. The method of claim 2 or 3, wherein the detecting step is specific for detection of a sequence within SEQ ID NO: 2 (Region A).

5. The method of claim 4, wherein detecting a sequence within SEQ ID NO: 2 (Region A) uses an oligonucleotide primer pair of Primer Pair 8:

| | forward primer |
|---|---|
| (SEQ ID NO: 4) | |
| | ACCGAAAACACACACATAAACACT |
| | and |
| | reverse primer |
| (SEQ ID NO: 5) | |
| | GGTTACTGGCTTTCAGGCGA |
| | or |
| | Primer Pair 7: |
| | forward primer |
| (SEQ ID NO: 6) | |
| | GGGAATGATATCACACTCGCCT |
| | and |
| | reverse primer |
| (SEQ ID NO: 7) | |
| | TTGCCAAAACGTTGCCACAAG. |

6. The method of claim 4, wherein detecting a sequence within SEQ ID NO: 2 (Region A) uses an oligonucleotide primer pair of Primer Pair 8:

| | forward primer |
|---|---|
| (SEQ ID NO: 4) | |
| | ACCGAAAACACACACATAAACACT |
| | and |
| | reverse primer |
| (SEQ ID NO: 5) | |
| | GGTTACTGGCTTTCAGGCGA. |

7. The method of any one of claims 2-6, wherein the detecting step comprises detection of a sequence within SEQ ID NO: 3 (Region B) or further comprises detection of a sequence within SEQ ID NO: 3 (Region B).

8. The method of claim 7, wherein detecting a sequence within SEQ ID NO: 3 (Region B) uses an oligonucleotide primer pair of Primer Pair 16:

| | forward primer |
|---|---|
| (SEQ ID NO: 8) | |
| | GTCAGCGCTGTCTACCTCGT |
| | and |
| | reverse primer |
| (SEQ ID NO: 9) | |
| | ACGGCTACTTCGCCTGATT. |

9. The method of claim 2 or 3, wherein the detecting step comprises detection of at least one sequence within SEQ ID NO: 2 (Region A) and detection of at least one sequence within SEQ ID NO: 3 (Region B).

10. The method of claim 9, wherein detection of at least one sequence within SEQ ID NO: 2 (Region A) uses Primer Pair 8:

| | forward primer |
|---|---|
| (SEQ ID NO: 4) | |
| | ACCGAAAACACACACATAAACACT |
| | and |
| | reverse primer |
| (SEQ ID NO: 5) | |
| | GGTTACTGGCTTTCAGGCGA |
| | and |
| | Primer Pair 7: |
| | forward primer |
| (SEQ ID NO: 6) | |
| | GGGAATGATATCACACTCGCCT |
| | and |
| | reverse primer |
| (SEQ ID NO: 7) | |
| | TTGCCAAAACGTTGCCACAAG |

and detection of at least one sequence within SEQ ID NO: 3 (Region B) uses Primer Pair 16:

| | forward primer |
|---|---|
| (SEQ ID NO: 8) | |
| | GTCAGCGCTGTCTACCTCGT |
| | and |
| | reverse primer |
| (SEQ ID NO: 9) | |
| | ACGGCTACTTCGCCTGATT. |

11. The method of any one of the preceding claims, wherein the rheumatoid arthritis is early rheumatoid arthritis.

12. The method of any one of the preceding claims, wherein the biological sample is a fecal sample, a rectal swab, serum, plasma, peripheral blood cells, or an intestinal tissue biopsy.

13. The method of any one of the preceding claims, wherein detecting the presence of Subdoligranulum didolesgii strain D8 is assessed relative to a control sample from a subject not diagnosed with RA.

14. The method of any one of the preceding claims, further comprising administering an RA treatment to the subject diagnosed with RA.

15. The method of claim 14, wherein the RA treatment comprises administering to the subject one or more compounds selected from: a non-steroidal inflammatory drug; a corticosteroid; a disease-modifying antirheumatic drug; and a biologic response modifier.

16. The method of 15, wherein:
a. the non-steroidal inflammatory drug is selected from: ibuprofen; naproxen sodium; celecoxib; diclofenac; fenoprofen; flurbiprofen; indomethacin;
ketorolac; mefenamic acid; meloxicam; oxaprozin; piroxicam; and sulindac;
b. the corticosteroid is selected from: prednisone; bethamethasone; and prednisolone; triamcinolone; methylprednisolone; and dexamethasone;
c. the disease-modifying antirheumatic drug is selected from: methotrexate; leflunomide; hydroxychloroquine; and sulfasalazine; and
d. the biologic response modifier is selected from: abatacept; adalimumab; anakinra; baricitinib; certolizumab; etanercept; golimumab; infliximab; rituximab; sarilumab; tocilizumab; and tofacitinib.

17. A method for diagnosing risk of rheumatoid arthritis (RA) in a subject, the method comprising:
a) obtaining a biological sample from the subject;
b) detecting presence or absence of Subdoligranulum didolesgii strain D8 in the biological sample, wherein the bacteria comprises SEQ ID NO: 2 (Region A) and/or SEQ ID NO: 3 (Region B), and
c) diagnosing the subject as at risk of developing RA when Subdoligranulum didolesgii strain D8 bacteria is detected in the biological sample.

18. The method of claim 17, wherein the presence of Subdoligranulum didolesgii strain D8 is detected by polymerase chain reaction (PCR) analysis or sequencing.

19. The method of claim 17 or claim B2, wherein the presence of Subdoligranulum didolesgii strain D8 is detected by quantitative PCR (qPCR) analysis.

20. The method of claim 18 or 19, wherein the detecting step is specific for detection of a sequence within SEQ ID NO: 2 (Region A).

21. The method of claim 20, wherein detecting a sequence within SEQ ID NO: 2 (Region A) uses an oligonucleotide primer pair of Primer Pair 8:

| | forward primer |
|---|---|
| (SEQ ID NO: 4) | |
| | ACCGAAAACACACACATAAACACT |
| | and |
| | reverse primer |
| (SEQ ID NO: 5) | |
| | GGTTACTGGCTTTCAGGCGA |
| | or |
| | Primer Pair 7: |
| | forward primer |
| (SEQ ID NO: 6) | |
| | GGGAATGATATCACACTCGCCT |
| | and |
| | reverse primer |
| (SEQ ID NO: 7) | |
| | TTGCCAAAACGTTGCCACAAG. |

22. The method of claim 20, wherein detecting a sequence within SEQ ID NO: 2 (Region A) uses an oligonucleotide primer pair of Primer Pair 8:

| | forward primer |
|---|---|
| (SEQ ID NO: 4) | |
| | ACCGAAAACACACACATAAACACT |
| | and |
| | reverse primer |
| (SEQ ID NO: 5) | |
| | GGTTACTGGCTTTCAGGCGA. |

23. The method of any one of claims 18-22, wherein the detecting step comprises detection of a sequence within SEQ ID NO: 3 (Region B) or further comprises detection of a sequence within SEQ ID NO:3 (Region B).

24. The method of claim 23, wherein detecting a sequence within SEQ ID NO: 3 (Region B) uses an oligonucleotide primer pair of Primer Pair 16:

| | forward primer |
|---|---|
| (SEQ ID NO: 8) | |
| | GTCAGCGCTGTCTACCTCGT |
| | and |
| | reverse primer |
| (SEQ ID NO: 9) | |
| | ACGGCTACTTCGCCTGATT. |

25. The method of claim 18 or 19, wherein the detecting step comprises detection of at least one sequence within SEQ ID NO: 2 (Region A) and detection of at least one sequence within SEQ ID NO: 3 (Region B).

26. The method of claim 25, wherein detection of at least one sequence within SEQ ID NO: 2 (Region A) uses Primer Pair 8:

| | forward primer |
|---|---|
| (SEQ ID NO: 4) | |
| | ACCGAAAACACACACATAAACACT |
| | and |
| | reverse primer |
| (SEQ ID NO: 5) | |
| | GGTTACTGGCTTTCAGGCGA |
| | and |
| | Primer Pair 7: |
| | forward primer |
| (SEQ ID NO: 6) | |
| | GGGAATGATATCACACTCGCCT |
| | and |
| | reverse primer |
| (SEQ ID NO: 7) | |
| | TTGCCAAAACGTTGCCACAAG |

and detection of at least one sequence within SEQ ID NO: 3 (Region B) uses Primer Pair 16:

| | forward primer |
|---|---|
| (SEQ ID NO: 8) | |
| | GTCAGCGCTGTCTACCTCGT |
| | and |
| | reverse primer |
| (SEQ ID NO: 9) | |
| | ACGGCTACTTCGCCTGATT. |

27. The method of any one of claims 17-26, wherein the biological sample is a fecal sample, a rectal swab, serum, plasma, peripheral blood cells, or an intestinal tissue biopsy.

28. The method of any one of claim 17-27, wherein detecting the presence of Subdoligranulum didolesgii strain D8 is assessed relative to a control sample from a subject not diagnosed with RA and not at risk of RA.

29. The method of any one of claims 17-28, further comprising administering a prophylactic RA treatment to the subject diagnosed as at risk of developing RA.

30. A method of detecting Subdoligranulum didolesgii strain D8 in a subject, the method comprising:
a) obtaining a fecal sample from the subject;
b) detecting presence or absence of Subdoligranulum didolesgii strain D8 in the fecal sample, wherein the bacteria comprises SEQ ID NO: 2 (Region A) and/or SEQ ID NO: 3 (Region B).

31. The method of claim 30, wherein the presence of Subdoligranulum didolesgii strain D8 is detected by polymerase chain reaction (PCR) analysis or nucleic acid sequencing.

32. The method of claim 30 or claim B2, wherein the presence of Subdoligranulum didolesgii strain D8 is detected by quantitative PCR (qPCR) analysis.

33. The method of claim 31 or 32, wherein the detecting step is specific for detection of a sequence within SEQ ID NO: 2 (Region A).

34. The method of claim 33, wherein detecting a sequence within SEQ ID NO: 2 (Region A) uses an oligonucleotide primer pair of Primer Pair 8:

| | forward primer |
|---|---|
| (SEQ ID NO: 4) | |
| | ACCGAAAACACACACATAAACACT |
| | and |
| | reverse primer |
| (SEQ ID NO: 5) | |
| | GGTTACTGGCTTTCAGGCGA |
| | or |
| | Primer Pair 7: |
| | forward primer |
| (SEQ ID NO: 6) | |
| | GGGAATGATATCACACTCGCCT |
| | and |
| | reverse primer |
| (SEQ ID NO: 7) | |
| | TTGCCAAAACGTTGCCACAAG. |

35. The method of claim 33, wherein detecting a sequence within SEQ ID NO: 2 (Region A) uses an oligonucleotide primer pair of Primer Pair 8:

| | forward primer |
|---|---|
| (SEQ ID NO: 4) | |
| | ACCGAAAACACACACATAAACACT |
| | and |
| | reverse primer |
| (SEQ ID NO: 5) | |
| | GGTTACTGGCTTTCAGGCGA. |

36. The method of any one of claims 31-33, wherein the detecting step comprises detection of a sequence within SEQ ID NO: 3 (Region B) or further comprises detection of a sequence within SEQ ID NO:3 (Region B).

37. The method of claim 36, wherein detecting a sequence within SEQ ID NO: 3 (Region B) uses an oligonucleotide primer pair of Primer Pair 16:

| | forward primer |
|---|---|
| (SEQ ID NO: 8) | |
| | GTCAGCGCTGTCTACCTCGT |
| | and |
| | reverse primer |
| (SEQ ID NO: 9) | |
| | ACGGCTACTTCGCCTGATT. |

38. The method of claim 31 or 32, wherein the detecting step comprises detection of at least one sequence within SEQ ID NO: 2 (Region A) and detection of at least one sequence within SEQ ID NO: 3 (Region B).

39. The method of claim 38, wherein detection of at least one sequence within SEQ ID NO: 2 (Region A) uses Primer Pair 8:

| | forward primer |
|---|---|
| (SEQ ID NO: 4) | |
| | ACCGAAAACACACACATAAACACT |
| | and |
| | reverse primer |
| (SEQ ID NO: 5) | |
| | GGTTACTGGCTTTCAGGCGA |
| | and |
| | Primer Pair 7: |
| | forward primer |
| (SEQ ID NO: 6) | |
| | GGGAATGATATCACACTCGCCT |
| | and |
| | reverse primer |
| (SEQ ID NO: 7) | |
| | TTGCCAAAACGTTGCCACAAG |

and detection of at least one sequence within SEQ ID NO: 3 (Region B) uses Primer Pair 16:

| | forward primer |
|---|---|
| (SEQ ID NO: 8) | |
| | GTCAGCGCTGTCTACCTCGT |
| | and |
| | reverse primer |
| (SEQ ID NO: 9) | |
| | ACGGCTACTTCGCCTGATT. |

40. A kit for the detection of Subdoligranulum didolesgii strain D8 in a biological sample from a subject, the kit comprising at least one PCR primer selected from the group consisting of ACCGAAAACACACACATAAACACT (SEQ ID NO: 4), GGTTACTGGCTTTCAGGCGA (SEQ ID NO: 5), GGGAATGATATCACACTCGCCT (SEQ ID NO: 6), TTGCCAAAACGTTGCCACAAG (SEQ ID NO: 7), GTCAGCGCTGTCTACCTCGT (SEQ ID NO: 8), and ACGGCTACTTCGCCTGATT (SEQ ID NO: 9).

The application's sequence listing, which the Patent Office published only in electronic form, follows.

SEQUENCE LISTING (65 sequences)

SEQ ID NO: 1 - DNA, 2508948 bp, Subdoligranulum sp.
  misc_feature 1..2508948: note = Subdoligranulum didolesgii strain D8 genomic contig
  source 1..2508948: mol_type = genomic DNA
agaggttgcattgatgttttcccacaaaacaggggttggtgtcaatgccgtttctgaaatattgaacgcagcatttaaaagaggtatttttgacaagacgctgtatgagaagtacaaaattctaacatccaaaggaatacaggaaagatgtatgaaaatgtgctcaagaaggaagcgttttgaagtcgagaagaaataccttttaattagtgtacccgacggctttgaaaatgtatacataaagggcgaaaatgttaacatttctgaagaaaatgtatacatttttacacaaagtaaagtaaaggaaagaaaagaaagtaaagtaaataaaagtaaagtaaatgatgtgccggaagcggaagagtgcaaggagttaaaacacaagtatggaaaatacaagaatgtgttattaacagacgaagagattaaacagctaagagaaaagctgcctaaagactgggaaaagtggatagagacattttcggaaggcctggagcttaagggatataagtataataaccattatttagccatactccagtgggaggagagaagcggacagaaaaaggatgatatgagaaacagtaaatttaataattataaagacaccaacaaaaccgattatgcaagtattgaaaagaaaatacttgccgatatgtatggcaatagttaaagtgataaaaacagagacttgctaatacagaaaaacaaagattaagagtgtaagacggctgaaaattaaagattttgataggccgtgacataattgagagaatggcaatgtaactcattgtcaaaacccagtcatacggtttgttattattaaaatttagcgatataaagatttctgtatatgtaaaataaagcggtaaagcaacaaaacctccggttagcagtatgaagacaagggacgaataatcgtgagtgattttagaaaaataaaattaaaataaaaattcgatacagcaagaaagaatgatattaattttttaagcaaaataagtccaaagtatgtttctgtatataattagttaaattatatatttaataatgtattgataaattttaccggaggtgttggaaactgaataatacaaataaaacagatgacaacaaaatcttgtaaatttttgaaaaatttctttacataatatgttgttaatgatatactataaaaaacatattaaggttttttatagtatagaataaatattatacaggtgcgaacagtaagctcacataaaataaccgggggattcgcaccgattttaagcaaatatatgtattaaaaataagctagcgttttataagaaataagtatattttatagtaaaacagcttaatatagagcgctataattattatatattatatatttttgccgtcgcaccccgcaagggtgcgtggattgaaataaacgcaccagtaccaatatgtgtaacactattgggtcgcaccccacaagggtgcgtgaattgaaatcatgtctcaaaattaatataccgtgatataagtatggtcgcaccccacaagggtgcgtgaattcaaatgatgttaaaattgatgaaacaaagtgcgtgtgccgggaatgaggtgtgttggtaatgtgtttctctcggttattttgacaaaatttaaataactaaaatttttttattaattatttttgtatatatcggtaaggagcatacacttttacttttttggactagaattcaaaatttcaatagtaaagctgtataatactttaactagtgtaattgcaatattttgaattaacagtcgatattataatgctatattataatgttatattataatgttatattaaaatacttataaaaaccgatttgtatatatcggaaaatatattgtatttattacattatgctgaatattataactaaacagtatcttagctttctcggatacgcgggtgttgtaagggttaattgtttatgtgggataaaaatataatgatgtcagtattatgtttttttacatcgttttaaatagggttaataaaaattttgaactgctttatgttccggctgaagatttatatatattatttggttgctcagaagttttgcaaagaattgttttacgctgtcaatgaagaataaaaaagaaattataatctctatagaattatatttaaatcatgtgaaaaacaataaagcagcagcggctatgtatcttgctgattgataatataataatttaaaacaattataaattttaaaccggttgatataaaaatgataaataagtttttgtaaggaatattatatcaattaaacgctatagagagtatagtgtttttttatgcaaaataggtgtgggaatttataaaataagatttaaagtgtaattgcattaagcgcaaaatactaactttttaagttaatattataaaaatttgattttaataaattatttttaaaattcttaatgttttattaaataagtgtttaagtcatactgttctagtctttttagcggttattttatgttgttatatataaggtggtttttattttattatttaattaataaattattgtgaagttaagtatgatattttaaatggtaaatcttaggataatacgttttgcttcgataatccggcagtagtattctgtatcatacggtttttgttttctgttcaaatattattaaattttttagtctctgataaatattataaattgaaatgattagacattattaatatatatacctgattaattaatatgcggtattgtgggtttaagcggacggtatatattatttttatatctgtgtataatttaattatatctttaattatatattacaaataaaatttaatgaatatgtttattgttttaattgttaacatgaaatgtatttcgggaaaatattttattaataatgtataatattgtgtgcattttgtgtgtaatagtgacgaaaaaatatttataattgaaatttatataatataatgatataatgtttcaaaaggtgtttaatgtctctgaataaatttgaaataaaattgttgtctttataaatgccatagttggtttattgtatgagactatgcaaatttataaataggaggtggaatgcgttcttatatataaagacagcagtaattaatttatatggaggatttaatatgtctaaaagattaattagttgtgttttaacattatcggtattcatttttgtatttaattttggacttgcgtatgcaaattcagagactccaatcactgaaaaccaggatttactatcggcggaagaaaattttgaaccagtggaagcaaccgaagtaccaacctcaatacctgtttttaataatgacgataaggatggtacaaatattgatggtttaaaagagtatgtggaagaacatgaaagcgcaaacgagtctaatacttcatctgtgaccgaaaatacagatggttgtgattcagtttgtcaggtagaaattaaagttagaaataccagtggtgaagctattgaaaatgctttggtaaaaatagaagataaagacgcatatactgatgaaaatggaacggcatattttaaggatgttacttttggaacttataaattatatatatccgctgataactatatgtcaaaagctgttgatatttgtgttcagagctcaagtggtgaatctgtagttttaaatgtttcattatttgagaagagcgatgaaacattaaattctgtttcagctttatcaatcgaccctgtcggaagtttatctgattattcggattatgttcagaaaattttatccaagtttccgtcggcagatgattttgaaggttatggagtaacagagtccgcggactgcgatgttgcaacgccttcgttagtggctgacggtaaaatatattgttttaacgatgtaagaacatatgagtatgatgttgctaacgattcgtggtcattttatccgcctattcctacccaaagagaatatttcggcgttgtaaaagcgggtgataagctctatgtaatgggcggctgtattgacagaaaagcagtatctacggttgaagtattagatattaaaacaggcagctggagcacaggtatatctatgcctaattcaagatattcgtttaatcctgaaattgtgaacggaaaaatatactgtgccggcggattttatgagatggcaacaaatagttataattatccgtcagtcgtgagaaggatggatatatacaccgtagattcaaatacctggcagtcaatgtattgtgatgaaattgacggcggcggatatgcatcggcagtatataatgggcaaataatctacataggcgttgaagacagatataccggtcaggagactaagatatatcatcctttaacaaacacgtggtcatatcttacggacaggcctaatgcgcttctaagcaacgaaccttcaagcggcggaacatttttaaatttaggagacgtatatgtatattcaggtcctacagctgttaacactcatgttccaaaatgggatgatgacgatgagggcgaggaggaagagtatcgagatacgtgtacgtatttgtatttcccgaaaacagatgaatgggtaagtattggtttttatgatccgctgttagatgattcttatagaccgcgtcctctgcgcggagttgcatacaatggtttgatgtatcttttgcctgatacatataatggttattcttctctgagaacactttatttgggacaatatgcagaagaatatgtaaagttacaaaaccagaaagcagctgcaggaaataatcacgttttgatagctaaaaacggatacattgaagccaaaggcgacaatttatacggtcagctcggaaactctacaacaacgtcatcggatacatttataaccatacctaatatagataactgtataaaggtagcagccggaggagattcatcatatgcattaacatcagacggtaaactttacgcttggggcgataattcaaaaggacaagccggaggaggaagcggctccgcccaaacctcacctgctcttatacttgatgatatagtggatataagcgcaggaatcaatcatgctattgcagtgaaaaaagacggaacagtatgggcatggggaagtaatacctatggtcagttaggaataggttcgacaggaagttattacagtactccggttaaggtatttagcggcgcttgttctatagctgccggaggttaccattcttatgttatagaccaaaacaataatctatatgctgcaggtaaaaatgataagggacagctgggacttggaaacactgcaaacaaaaacacatttgaatatgtaatcaacaatgtcagcaaagctgccggaggaatgaatcattcggttattttgacttttgacggtgaattttttacctgtggtgataacagtatgcgtcagctggggcgttcaacagcggcggcttcatattcaaatacttttgcaaaagccggcgcggcaagtgatatatgggcaggattgaactcaacggcgtactggcaggataataagttgtaccaatgcggcgccggtataaatcttagcagttatttctctcagatatcggaaatttacggtttagatagtgtaacattaaataaaaaatgttatgctttaacaaataacggcgaagtaatgcaatgggggctgatgtctgaaactaatgaaataatgagcgctcagaatatgcttgtgccccaaaaaattatatctgacaatagctttacagatgttgtcaccaggcggtatcaaaaccttgccatagataagaatttgaaagtatgggcatggggagaaggatattatgctgacggcaccgataaaatggccgtatattattatccaaaacagataggtggtataagtaatgcggttcaggtttcaagaggtaaaaaccataacttagttttggattcgagcggcaatgtttggggctggggaagcaatacaaattatcctatgagcaacagcgtaggaggaaaagccagagtagctacaaaaataacttctatatccaatgtaaaacagattgctgcaggcacggaatttagtatattccttaaaaatgatggaacgttgtggggagtaggaaagaacgacttgcatcagataagcagcagcgctgaagcaaattatccaaaacctgtaagaatatctgacaaatcagattttgttaaggttgttgccggagacacgaaaagcctggcgcttgattcgcagggaaatgtttataccataggaggaagttccggctttgctgaattggactttacatttaccgatggttcgagcacaaaaattacagatatatctatggggcaagatcattgtttggctctgactgataaaggatatgtatacagttggggcgataacagccaaggtcagctgggtcttggcgacaaaacaggcagaaaatcacctgagttagtaaagatatcctcaaattcgattctgaaaaacgttaaaagtatatctgccggatataggcaaagcttcgcagtaactgctgataacaaggtgtatggatttggaagcggaactgcatatcagcttgctataagcaataccggtacagttcggtttgctaccttaataagcgcgttaaataataagtccataactaaagttgccgccggagtagatttttctattgcgcttagcaatgacggaaagatatattcttttggaaattctttaaacggcacgctcggaatatataataccgaggctgttgagatatattattaaggcaattgttatatataaacataagaataataatataatcaatttatttttttgacgataaagcagcacagcaaaatgcttaatgcattttgctgtgctttttatttataaataaaactgaatactgcgtttaaattgttttatattataaatttataagtagtttttccggtataaatgaaataaaaatattttatattttaagaagttgaaaaaatataataaaactatgagctcctgactatagtttggatatttaaataatttggttcagataacaaagttgttataataaaaacggtaaatacatataattaaaaattttttattttgtgttattatatacagtgttttattgaaccattgcaggcatgactgggtgtgattaaaagtgacttgttttgattatcctgcaaggtcaattgtggctacacttttatttaaaagtgtatgttatataaaccgtatagtgtgatataaactataaatgccaataattaacttagttgttatataataatcaaacttaattgtgatgtgcaaacgtagtatgccgcgttagggcgcggtcacggtgatataaaatatataaatattgttctagcaaatatctatttaattattctgtaattgcttactttgctgcgccagccccagtttcgcccgccgagcccgggcaagatcggcttcccaaaataggaagccgattaagataatacttataaataaaattagtaaagtataattaatttcaaaacaggtaatggaaatagatatattaaaaaatgagaagaaagatgtggttcaaaggacacgaattcgaaagtttataaatagattggtatcagtatgggatattttagagtaataaatatcattatatatttggtaaaattcaaaaaattaagtatctgtatttttttataatagtatttatataagaataaataacagacgtctgaaatgagctattatttaagttataaatacaataaaaaatatggaaaaataataatatgaagctaacaaaattcagagtaattactttacataacaatatattaatgatataatataaataattcagtaattcttttaaaataaagataaaacattaggtgcgaattgtaagctcacataaaattgccgggaggttcgcaccattaaaaacaaagatatataataaaaattgtaagtaataattaatcttatattacatattttgtatgataagctaaatatgccagattaaagcaacgcaaatattattttttatatatttttgcagtcgcaccccaccagggtgcgtggattgaaatttatgttatattcaagttggatttattttttatttttgtcgcaccccaccagggtgcgtggattgaaatctataatacgacggtaaaagtgacaataaactatccatgtcgcacctcaccagggtgcgtggattgaaattttaaagccaagtaattacaaagagagtttaaaagcgtcgcaccccaccagggcgcgtggattgaaattaaaaatccattgtcaattaaatattcaatggtcccgtcgcacctcaccagggtgcgtggattgaaatgaatttaccaaaatatgaagacgttatgtatgaaggtcgcacctcaccagggtgcgtggattgaaatacctgtgttcccgttgtcgtaatacaattttattcgagtcgcatcccaccagggtgcgtggattgaaattacgtgtgctttagcaaatacaagttccatatcacgtcgcaccccaccagggtgcgtggattgaaattccctgttctgttaaattgaacgtatcttttgcaaagtcgcaccccaccaaggtgcgtggattgaaatcgaaatccccacgttacattctcagaaatagaagtcgcacctcaccagggtgtgtggattgaaattcataataatgtaatgctaatcggcaaatagtcattgtcgcacctcgctagggtgcgtggattgaaatttggaaagcccaatacggcattatcagtgataaagtcgcatcccaccagggctcgtggattgaaatactttataagcagcagaatcatatctgtttcgcgaaaatcgtcgcaccctacaagggtgcgtggattgaaataggagtttggtcttttgttacaattcccatatgctggtcgcaccccacaagggggaatgggttaaaatgattgtcataatcgtataatttatatacctagactgttacaccattccgagggcgtgaattcagataacttgtgaaaatgtggaaagttgtttgtgtttggatttagtagttatcggtaaaaattgtaggtattacttatttaaaagtataaatttatcagtaattaaaattttataggttacatttagtgattttatttgtactactttaaaaaatcttagtaaaagagctatattatactttaaacggagtggctgcgatattttaaatgattttactttatattcgcgtttttgttaccatagatataaattacattttggaaagttttagagaatttagagagtatagttttgttgtatgtaaatatttttgccggtattgcgattacgttttgccggtgctttgtttccaataattatactttttatttaaggttaattttatatataatttgtgtttaaaaatatgcaaatgggatgaaagttaaaatgtttgatatatatattaaagataacgaaaatgttaggtatgttttaggaacaaagggaaacagaactttatgcgtgtttggaattaacccaagtacggccactgataaaaagcctgacccaacgatttcaagaataaatacatatttaaacaggtatgggtttgacagctttaaaatgatgaatatttatcctttaagagctacagagcccgacagtctgcctatgcagatagacatgaatatacacagacggaacatgaaagaaattgaacaggcactaatcagttcttcagcggtgctttgtgcgtggggaaacttgatatacgaaagagattatttaaaacagtgctttatggatatttctgaacttataaataggagcaaagttccgacatactgcttgggaaaaacaaaactgggaaatcccaggcatccattggcaagaaagccgacgcctgcggaattgacaaagtttgatgttgaaaattatttggaagtaataaacggctaatataaataattcttgagatgcgtatattgttgtgttatcataatcagtctttttatggatactctgttatgggcaatatgtttaaatgaactctatttaaagattttatatttaaaataaaacgacggaaggttacattaaaatagacagacaaattaagtttctgtataaaaaattatataataaaatgtgatatagcaagtctcggcaagtgtgtccctacctgaaaggtgggtgtgatataaattggcttgttttgataaacctacaatgtggatagtcaacactaatttagacaacttatttaaggttagtaagccgatattctttcggggtcatatagtccagtgatgagtgaattctgtgattgttaaaccagtttacataatccgataattcatatcgcattgttccaatgtttcatattcttgaccttttacaaattcagtctttatgattttaaatgtggtttccgctgcgcattgtcatagggacagccttttcttgctcagtgagcggtctatgtggaatgtctcaagcgttttatccagtgttctgtttttaaactcgtttcctctatctgtgtgaaatatctgtattttctccggatttatatttattctgctaaacgccttgactaccaatgcagcatctttgttctttcctgcgctgtaacctatgatttcctaattaaacaggtcgactagcacacatatataatcctacctgtttcctgctcttacatattatactttctattttacatgaccttaacttttttgcccagttttttgtttcctatccaatataattgatatattattttggtgtggaaaacatgaacggctttataaattgtattttcataaattctattaatagagcagttaataatttaaagatatacttaattaattaaataaaaagagtccggtataattccgaactctttttatttaatattgtttttgtttaatctttaaaagtcacttcaaatactgattctttaaatatttaagttattataaaagaatctttttagcagcttcaacatcttttatatctataagacatgagatttccgtctcagctgttgttataagcttaacgcggatattttctttggcaaacagcgaaaacagttcagctgctacgcctgactcagacctcataccatcaccgctcagcaggattttagtgttgtttccgtttatgtcggctttaatagacggggcaagagacttgaactttcctgtaagcccgataacctcgctcaaatcatcctgagaaagtgtaaatgataagtttatcttatctttgtatggttcggtttgactaatcatatctatgcttatgccgttctctgcaataacgctgagaatgtttgcaatactgctcggagtgtttggaatattatttaatgtaacaatggcaacctccggaaaaaactcaatatcggtgatggttttaatcatgtgataacctccaatatataaaatgtggtttatacattcaaactaagactgctcaatcaaatctttcatatcatacataccgcagggctttcctttcatgaaaactgcggcttttacagcgccgacagcaaaaacttcttttgatgaagcgctgtgttttatttctattatttcatcattgccggcaaatataacatcatgttcgccaacaatggtgccgccgcggacagcgtgtatacctatttcagatttatcacgctttttacgtacattatgtctgtcataaatatactcggtgtcaaaacttactgcgtcagaaatagcgtcagcaattgcgagcgcggttccgcttggcgcgtcaagcttttggttatggtgcttttcaattatttcaatatcaaagcttccgtcaagcagcttcgccgctttgcataccaagtcaattaaaagatttacgccgagagacatatttgctgagaaaaagataggcgcttttttagaagccgccttcatttttgaaatctgctctcctgaaagtcccgttgtgcaaataacagcaggagtttttgtcttaaccgagaattcaagtatgctgtcaaatacagacggatgagaaaagtcaattataacgtcaaagggttctttgacttcatctaaattatcgtagacaggaaagtcagagtttttaaccgtgtttatgtcgtatcctgctgtgattttgactttgtcattattttccactgttctggtaacagcgcgtcccatgtttccgttagcgccgcttagtagtatatttgtcatttgtatcactgtctttctgttttagtatattaaagcaaacactttacattattttcttttaaaacatttttaagagtctctaaattcttatccgacatatcacagagcggcattcttagaggaccaaccttatatcctaaacaattcatagcagttttgacaggtatagggttaacttcaataaatagtgtattaataagctttattaaactcaaaaacagttcctttgatttttcagtctctccggtttcgtaaagtttgcaaatatcatgcgtttctttcggcaatatattggcaacgactgaaataactcctttaccgcccaaagacataacaggaacaataatatcgtcatttcctgaatatatatttaggtcagtttccgccgcaatatttgctacaaatgaaagattgcctgtggcttcttttatagcgtttatatttggaatttttgcaagttcttttaatgtgtccagggagaatgaaagtccgccggttctgcccgggatattataaagcactatcgggatattaacgctgtccgcaattgctttggtgtgaaggtataaacctttttgagttgttttattataatacggggtaactataagcagtccgtctgcccctacgctttcagcatacttgctcagttctattgcatgggctgtatcgttgctgccggttccggcgattaccggaatccttttgttaactttttcagcagtgaattttattacagacttatgttcttcgtccggcacagttgaagattcgccggttgttccgcaaataacaatacaatcggtctgatttgcgatatgaaattctataagttcttcaagcttgtcaaaatcaactccggtttcagtaaacggtgtgactatggcaacagcgcttccggtaaaaataggctctttcataacagaagttcctttctttcaaaaaattaattaatcaaaatatccttttgaggccagcagttccgccattaatacagcgccgcctgcagctcctcttaatgtattatgtgacaggcaaacaaatttataatcatactgagtatcttcgcggagtcttcccatagaaacagccattccgccctctaagtttctgtcgagctttgtctgcggacggtcaggttcttcaaaatagtttaaaaactgtttcggcgctgaaggaagctcaagttcctggggcacgcctgagaagtttttccattcctctttgatttgctctatagttggtttatttttaaactttacaaaaacagctgccatatggccgtcgcttgctgcaactctgagacattgcgttgtaatagccggagagctggcttcaacaattttgtctccgtctatctttccccaaatcttaagcggttcaacttcgcttttttcttcttcaccgcctatatacggtataacgttatctaccatttccggccatctttcgaacgttttcccagcgcctgaaatagcctgatatgtgcaggcaagaacagattctattccatatttcataagagggtgaagcgccggaacatagctttgaagcgagcagtttgactttacagaaataaagcctcttttggttccgagacgttttctttgagcttctatgatttcagcgtgctcagggttgatttccggaacaatcataggtacgtccggcgtatgtctgttagcagagttgttagaaactaccgggcattcagccttagcataggcttcttccaaagcttttatttcgtcttttttcatatcgactgcacagaagacaaaatcaacctgaccggttattttttctatgtcgttagcagcatcataaacaatcatttcagacacatagtcaggaatgtcagttttcatgacccagcggccgcctaccgcttcagaatattttttccctgcgcttctcggtgaagccgctaaaagctttatattaaaccagggatgcttatcaagcagcgttataaatctctgcccaaccatgcccgtggctccgataattccaacattatactgtttcaattttaaatcctccttgaattcattggtatacataattatatgacaatattacaattatgtcaaatgcttttttgtattatacgtaaattaaatttaacaaaagataataaagatatatatggctttttgtagaattatgtgttataatatcaggcatgcggcaaacgttcaaatttgtttgcgtttagctgtactgacagagatatttttaagcggggtgacacattgtggataatttcatgttttttaagcggcaaggttttagattgttctctgttttcactgttttggctgtgtttttttgcacacttgcaggatataagacttttgtgtctgctgatgtttatgtgccgtcaaatattaaagtcgggctgttttacggctcgtcggctaaaacgtctgtgaaaatcacaagtgaacggggatattatgcaggagtatttaatgacagagatttttctgaggagaaaattatagaggataccgatgttatagtcagcattgctgaaaatcaggttgtgttatctgatttggatggtaatgtattatattctgaatccggtaataatggtataggtatatgcccgatttataccgatttttgggaagagagactggaaattgatggttcgggatatcgcggaagcctgaattttattaaggacggttcaggaatagctgtgattaatgtggtcaatatggatcagtatttatatggtgttgtatcaagggaaatgagcgaatcatggcctcttgaggctttaaaagcccaggcggtttgctccaggaattacgctgctcagaatttaggcaagcattcttcatatgggtttgatatttgtgcgaacacgcattgccaaatgtataccggtatgtcaagagaagcgcagtctatatatgacgctgtggacgctacggcaggacaggttatgacatataacggagagctttgcgagtgctactatgcggcgtcaatgggttctaccaccgaaaatgttaagtatgtttggggcaacgaggttccatatcttataagcgttgacaatagttatgaagatactgaaaatattccgaatggtatttggtccggcgtattgacagttgctgaagtatctactataatgcgtaacagaggatatgatgtgggcgatgtgcagaaaatagaggtgcttgaatattcacctgaaggccgggtgattaagatgagagttaccggcaatactgcaataaaaacattggaattggaagagtgccgcacagtgttcggcactgtaaccaagagccaaatgtttactgtggtgggtgacggagacgctcaggggcaggcttatgtttctgtgacagacggttcaacacttatcagaagacgtccgacacagcttgaactgcttacaagttccggcaggagtgagttttcgggcgaatctctttatacaactaacggacagtatcaaaaggtatatgctgattcttatgaagaatcaagcgctaatacttcatttacgtttaaaggctcaggctggggacatggtgtcggtatgagccagtatggagcaaaaggtatggctgaagccgggtatacatatgatgagatactgacccattatttcagcggcgctgaagttacaacagtatattaatataggattggagtaagttgagttaaatatgacaactaaggatttttattacgatttgccgcctgagcttattgctcagcatccgctgaaggatagggcaggttccaggctgcttgtcttagacaaagaaacaggaaaaatagaacataaaaattttaggaatataatcgagtatttgaatccgggcgactgtcttgttatgaataacacaagagttataccggcaagactgtacggcgtgaaagaagataccggcggtaaaatagagtttcttcttctaaagaggatagatttaaacacttggaacgttattttaaaacccggaaaaagggcaagaaccggagcaagattcgtgtttggagacgggttgttaaaggctgaagtgattgaggtaagacctgacggaaatagaattgtaaggtttgaatacgacggagtttgggaagaactcttggataagctgggagaaatgccgctgccgccgtatataaaagaaaagctagaagataaagaacggtatcagactgtttattctaaaattgaaggttctgccgccgctcctactgcgggtttgcattttaccaacgaacttcttgaagatataaaagataagggcgttaaaaccgcttatttaaccctgcacgttggtttgggaactttcagaccggtttcggttgaaaatgttgaggaacacgttatgcacactgaacattatgaggtttcgcaggaagcggcagatataataaatgaaacaagaaagagcggcggcagaattatcgctgttggaacaacgtctgtgagaactcttgagactgttgccgaagataacggaacaatgaaagctgagataggagacaccagcatttttatatatccgggatataagtttaaggtgactgattctataataactaattttcatttgccggaatcaacattgttaatgctggtatcggcgtttgcagggaaagaaaatatatttgaggcatacgagcaggctgttaaagaaaagtatagattcttcagttttggcgacgcaatgctgctcaagtaaaattttaaccgggagaaagtagatatatgtatagattgatatcaaagcatggaagagcgagacggggggaattcaagactgttcacggaactattcagacccctgtgtttatgaatgttggcactgctgcggcaataaaaggcgcgcttgatacttttgatttaaaggatattggctgtcaggtagagctttcaaacacttaccatctgcatcttcgtccgggcgacgaagttatacgcgacatgggcgggcttcataagtttatgaattgggacagaccgatacttaccgacagcggcggatttcaagttttctctttagcaaaactcaggaatataaaagaagagggcgtttatttttcatctcatattgacggacataaaatttttatgggccccgaggagagtatgcgtatacagtccaacctggcgtcaactatagcgatggcttttgatgaatgcgttgaaaatccgtgcgaaaggcagtatgctcaggattctgctgatatgacagttcgctggctgaaaaggtgtaaagatgagttggcaaggttaaacagtttggataacactataaataaaaaccaaatgctgtttggtatcaaccagggcagtacctaccgcgatataagaattgagcatatgaaacaaatagttgatttggatttaaacggctacgcaatcggcggactggcagtcggggaatccacagaggacatgtataatattattgaagcggttgaaccatttatgcccgaggataagcctagatatcttatgggggtaggaactcccataaatataattgaggcggtttaccggggcgttgacttctttgactgcgttatgccgagcagaaacgcccgtcacggcactatatttacatctgagggaatcctgaacataagaaatgctaaatatgagagagacgacagacccgttgaccctaactgcggctgtcacacatgcaggaatttttcaagagcatatttcaggcatcttttcaaggcaaatgaaatgcttgccatgagactggcggttattcataacctttatttttataataatctgatggcagaaatccgttctgctctggataatggaaagttttccgaatacaggcaaagcaaacttggcgttttagacagacatatataaaaagagtccgaaaggactcttttattttttagattttattaactgaatgagttaagaggctcacctacattggtgaattggttgtcttccggagacggctcagacatgctgaaatacattttagccgccttagtagttccaaagtcacggtttgaaccggtgttttgcactttgttaaatgcctttttaaacattgtgttgtgagcttcctcacggtttagaagaaagtctatggtctctttaacgcatttgtcatctatctgacggtaaagatattcataaacgacttttgcacgctgttctgacgctatatttgatagtaagtcagcacacaggtcgccggttactgttacataatcgcctgtccatgaatatccggaggcgtttataagtccgggattgagacccaaaagaacgtgtgactgtatttctcctgcctctactttttcataatctacgtcatgtccgttaagcatgtttattgtggtcgctaccatttccatatgccccagttcttcagctgctatatcaagaaacaaatctttgatttccgggtcttttattctgaaactttgagacatatactgcaaagcggctttgagctcgccgtttgctccgcccagctgttcctgcaaaagcgctgcatactgcggatttggtttctcaacgctgaccggatggaaaagtattttttcatgtttaaacatttttaacactcctttcttattctaatttaagtttgtgctatagggattaaaatatacattacatgaacaaaaaatgtttattgttagtatttaaaagaaaaaagacctagtatattgctgggatttgctttctgaattatttaaattgcaccttgaaaacaatgcggtgttatgctataattagccctgcgtgaacaataataaatataaaggattgataataaatggggaattatttacaaaaacccggtttacatataaagaaaaacaggtttgcggttaagttgatgtcctgtataactgctggaatgttgattttttcttcaatgtctgcttttgcgtctgtgctgggagagcaaacaactcatactgaaactgagtacgcccagggaaccacttataataggaatacctttcagagcgacagtgttggacagcagactgaaaattattttgaatacataccaaacagcgatgttctgcctatagtttctaatggagaccaggtttttggaaaacgtacttctgttgaagctaatgaatatttaaatgagcagggaatttttgcggctatgggtatgaacgctgattttttctctttccaaaccggcgtgcctatgagtgatacaattgtggacggaaaggttctgacgtctgaccaggaaaagctgacaggagtgggttttaatgcggacggcacaggctttatttcgcctctgcaaatttatatatctgttgaaacaccggaaggcacgctgtttgatatagaatgtttaaataaataccgtcagccgtatgttatgtatatttatacagatgaattcggagattacaccaatgcggaaggcagcggtaccaatgttgtcttgggaaatgtgagcggcggtttttcgctgggacagccttttacggcaactgttgagtccatcacttcggataacggttcagtggcaatacctgacggaaaattggtaataagtgtagatgacagggtcgcggatgaggtaaaagaccgtttaaatcagctatatataggtcagaccattactgttgccgcaaatgaagtgacaggcgacgcacgttggaacagcgcagtatacggcacaggctgtctgggaggaacattgcttcggaacggacagctggattatgaggacgacagcgcggcgccgagaagcgctgtaggaataaaggcggatggctcgataatattttatactatagacggcaggcagccggggtatagctatggagtcagaaaagaaactttggcacgcagacttttggaacttggatgtgttgacgcagtaaatttggacggcggaggaagcactcagcttggagggactttgcctgaaaccactgagtttaagattttaaattccccgtctgaaggattacggagatgcgctaactttatatttttaaagaagatgaatccgccggacggtataccttataaactgctgacatatccatatggagaatatgtattgtcgggcagcagtgtaggagtttgggtagcggcgattgacaaatcttacggaaaagctgaaataaccgagccaatttattattctgttgagtcggataatacaactgtggggcaggccgttataaacaatgacggttatgcaacattgtacggcgatggggatgtttatttttcagcagttacaggagaggcgtatggcagtactatgcttcattcagtttcaaaccctgacagtattgttattaaaaatgaatcagatggcagtgaagtgtcgtctttgtcagtttcatcagggcagacagtttatttaacagctgactcggtatatcagaatattaacttgacagattcagacgaagcgtatagctggagcgtcagtgatgagaatttgggaacaatttcagctgacggaacctttattcccggcaatgtaagcggaacgggaactataaatgttagtgcgggttcggtctcggcttctgtaaatcttacggtttcagccggaccggaacagataccgacctccacacctcgtcctttggaaactgattatccgacgataacaagttcaaataccggaaatgcttttgtggctaaaatattcggaacacatgggattatagacgaggacaatattaaaatgactgtcgacggagttaaaaccaagtttagtttttctcctgaaactatgactgtcgaatatgtttaccctgaggattttttaaataatcctcatttgatatctgtatccgtaacggatgatgagggatacagcgcttataaaaccttaagcgtcggagatatttctgcattaaccaatatttttgaggatacgaatgaacactgggcaagggattatatctcatatatgactaaacgcaaggttgtttcaggatatgagacggataacgggtttgttttcagaccggacaaaaatatgacaagagcggaatttgcttgtatgataagcaattacttgggattaaacgtttataattaccgtggagttgagcttccttacgctgataaagatgaaatacctgattgggcctttatgcaggttcaggcgatgtactcattaggtataatgacaggtcagcaggatggggacagggttttcttctcgccttcatctaatattaaaaggtcggaatattcagttgcatcggcaaggttaatgccttcaggtctttatgcggctccggtttcagcggtggacgcagaagatataccggactgggcgagaagcagcattgagcttttgctgactcagagtataatgagcggttatacagacggttctgtcagacctaataataatgtgacgcgtgccgaagctgtaaaaattctttacggtataggatagagtgctttaaccttttatttgtaaataatgtaagtttgttaaaaaaagacttgcaatttatatcagttaggtttataatagttagcgctggggggaccgcggttatggcggttgagataagcaatatgcttgaccctttgaacctggcggttaataccgacgtaggaaagcacaaaatctaagagatagaatttattttttagtgcttgcctttgttgtaggtaagcacttttttgtgcgcaaatattttaaaaggagttttttattatggaaagaaattacactacacaaatggatgcggcaaaacgcggcattttaacgccggaaataaaaacggttgctgaaaaggagaatatgtctaccgaagagttaatggaattggtggctaagggagttgtcgctattccggcaaataagaatcataagacattgtcacctgaaggaataggtcaggggctgcgcactaaaataaatgttaatctgggaatatcacgcgacgctgcggatatggatttggaactcgaaaaggttagaactgctataaatatgaaagctgaagctataatggacctttctaattacggaaaaactcatgagatgagaaaaaagatattagagatttcaaccgctatgcttggaacagttcctgtttacgatacaataggatattgcgaaaagaagctgaaagatataactaaggatgattttttaagagttgtccgtcagcacgctgaggatggggttgacttcatgacaatacatgcaggaatcaaccgcgctacagctcagaaagttaaggacaacagaagacgaatgaatattgtttcaagaggcggagcgcttttatttgcctggatggaaatgacaggaaatgaaaatccgttttatgagtattatgatgaagttttggatatattccgtgaatatgatgtaactatcagtttaggagacgcctgccgtcccggatgtattgatgacgctacagatcctgctcaaatatctgagcttatagttttgggagaactgacaagaagagcctggaagaaggacgtgcaggttatggttgaaggtccgggtcatatggcattgaacgagatagccgcaaacatgattgctgaaaaacgcatttgcagcggcgctccgttttatgttttggggcctttggtaacggatgttgcgcccggatatgaccatatcacttccgctatcggcggagctgttgcggcagccaacggagcggatttcctatgctatgttacaccggcagaacacctcagactgcctgaccttgatgatatgagagaaggaattatagcttcaaagatagctgctcatgcggcagatattgcaaaaggagtgaaaggcgccagggagtgggataataaaatgtctgacgcccgccgtgagattgattgggataaaatgtttgagcttgcacttgaccccgagaaaccaaaagcgtatagagcaagttcggttccgcgtgaagaaaatacttgtaccatgtgcggtgaacagtgtgcagttaaaaatatgaataagattcttggcggagaagatataggcatataaggataatttaagaaagaggtgtttgggtttgaaaaatctattaactatagcaggttcggattcgagcggcggtgccggcatacaggcggatttaaaaacgtttgctgccaacggcggatatggaatgagcgtgataacagctgtgacagcccaaaatacgacaggagtttcagcagtgcacaatattccgcctgaaattgtaagagcgcaaatagacgctgtatttaacgatataaatgtggatggagtaaagatagggatgttgtctacagcagatattgccaatgcggtggcagacgcaatggaagtatataagcccaggatattgattgtagaccctgttatggtatcaacaagcggttcaaagctgctgagcgatgaagctgttgaagttataaaaaaccgtcttttgccgcttgcaactatggttacaccgaatattcccgaggctgaatatatgtgcgggcaggagattaaaaatattcatgagatggggcaggcagctcagattattggtgatatgggtcccggatatgtgcttataaaaggcggacacctcaaagaaaacgctaatgatttattgtataacggaagaacaatgacaatatttgaaggcggcagaatacatacacaaaacactcatggaacaggctgttcgatttcgtctgcgatatgtataaatatggcaaagggaatggacgcggtattggcggttggtgaagccaagaagtatgtgaaaaccggaattgaaaacggtttaagcataggaaaaggaaatgggccgattcatcatttttatgatttatggaaaacgtcagacccgaatgtagaaattgaatttaaatgtatagaaaaggaatagttttagaaatttttttaaaagaaaatataaaagtttttaattaaataacaaaatgttaagaccgatatttttatcagtaatgtgaatcattattttatataatataagatgttattaagaagcttgattattagtagataataactgtattgtggcaggtagggctatatttttgaaaaaagctcattgaaggttaataaaaacaattcactttgcatcacacccacctaaaaggtggggtcacagacattgaaggttaatcaaaacaagtcacttagtaacacacccacctaaaaggtggggtcacatccgatgcctgcaaagccacatttttacttaattttctattttagatttatctaatatacagtgtttttagtgaacatcggaagggcgtgcaagcacgcctcgttaggtgagctgacatatcacgcggagcgtgaacatatttaaaacaatatgtttatttttggttaatataaaataccactttttaaatttatgaagatttattgtttgagagattgttaaccggtgagcagatataaaaatgatttatatgttggtaacctcagatgtgaactaattaattttaaaaattaaaacttattatataataacgacagcatagacggaaaggatacataatttagctatgaataaaaatgacaaaatgcttaaggaagtaatagatttaataaatagaatgaaaagcactcgtcctttggttgagtgcttgacaaaccgtgtgactataaatgactgtgcaaatatgctgctagctatgggagcttctcctattatggcagaaattgagtgtgagatggaagaaatcatgaatatatccagcgcgctggtaataaatctaggattgcttgacggtacatatttgtctgctatgaaaacggctgccgaagccgcaaaaaggcttggaaagccaatagttttagacccggttggagcgggggcatcaaagcttcgggatgaaacctgcagagagatgatagaactgacaaaaccggatataataagaggaaatatgtcagaaatacgcgcgctgaccggcggcaatataagcagcaaaggtgtagacgcgtcagatgatgacgctgttaatgaaaccaaccgtttagagcttggggaactggtaagagggtatgcagagaaaaccggaagcgttgtttgtgctaccggagctgtagatattgtctctgacggtgttcaggtattttatttaaaaaatggacatgatatgctatgtgatgttacaggaaccggctgtatgtgcagcgctatgacgggcgcagcagctgcagccggtgagcctcttgcggcagcaatagccgcggtggttatgatgggtattgccggagagtatgcctatgaatatgttaaagagaccgaacagggtattggaactttcagagttaaactattcgattatatttatagtttatcagatgaggattatattaagcgcggagagatttataactaataatttataaattgggagataattatggataaagtaaattatggactgtatttagtaaccgatactaatatatgtcccagagaaaaactgctttctgttactgaatcggcaataaaaggcggagtaactttggttcagcttcgtgaaaaagatatatcaaccagggaattttttgctgaggcttctgaacttaaaaagctgtgcaagcattatgatgtaccattgctgataaatgacagaatcgatattgcgcttgctgtggatgcagacggaatacatatagggcagagtgatatgcctttaaaggtatcaaggagaattttaggttcaaataaaatcataggattatcagcaggaaacgttaatcaagctgttgaggcgcttaatgatggagccgattatcttggagttggtgcggttttcccaacgtcaaccaaaaaggacgcttcaaatgtgggaattgacatgttaaaacaggtcagaaaatctgttgatatacctattgtgggtatcggcggtatcaatcctgaaaatatcagtcagctgtatggctccggaatagaaggagtggctgtcgtatcctgcataatgggaagcgagaacccttatgctgtctcaaaacagctgtctcaaatggttaaggagttgtaaatattatgagaaatgaatcaaatagaaatggcaaagagtttttatcaaagaagaaaaattttatatttgatttggacgggacgctgatagactctatgtgggtttgggataacctgcttgttgattttctgaatcgtcataattatgaaactccgccggaacttttaaaagaagttgcatatatgtcgttagagcaaagctctaagcgcgtatgtgagctttttgaattgcctatgtctcctaaggatgtaaacagagaatggactgagatgatatacgacggttatgctaaagagataaaaacaaagccgggagccgcggaatatcttgaaaatttaaagcgtgaaggaaagacggtggcgctggcaacagcaaactcgaaagaattgaccgaagcatgtctcaaaaataacggaataatggaatatttcgatgttttgacatttgccgatgaagttggagagggcaagtcaagtcctttgatttatactgaaactttattaagagttaatggcgtacctgatgagtctgtgctttttgaagatatacttcaggcgtataagacggcaaaaatgatacctttggatgttgtcattgttgaagacaggtcagcggaaggcgataaatctgatttaatgaaatcggccgacctatatataaaagatttttatgacttaatataaaaatagtttttatttataataacttgattgtaacgatattaattattatatttgttatctttaatttggattatatgagtattataaagggtaacttgcttatatattacaatactattttagatataaaatatttatgtctaaaatggtataggaagataatattctgctcttatctatatattatttttgaaatagttatgtataaataagataaatttttgattgtattttatgatataaataaaaataaataaagtttaatataaaaggctatttttagccttttttttgttttatgaatttatattacaaataaatatatgtaattaatttcctgaaaaatcaaaaaatatgcaaaatcttgttgacaaaataaatgcgctatggtagattataccatagtaatattttgaaaaaaatgttaaaaaatattttatttagaatattaaattgcatatataaaaatgataataaaaaaatatataaaaaataatattaaaatgaaaaggaggatagaagttaagtttaaaatttagtataagtataagttggagggagaatatgaagaaattattaagtctatttttggttattgcagttgtattttctgtttctacatctactattttaattaatgcagatgaagatagtgaaaatgcgacaaatcaaggattatcaggggaacaaacatcggtttctgaacaattagaacagctggcagaagagtatactgacagatttattataaaatataatggggatattgaagaagctgtaggatatgcgtgcgatgaatcaaataaagtaaaacaacaggaattagagacaataaaaggtagtaatgaagaagagtttttaaaaatatcggaaaatgatgaagagattgtggtatctaaaagtgttcgtgatttaatatctaaagagaataccggtgatatatcaaccttttcagatgagcctgtatatgagattgatcaagagaaaagtgtaataaaactatctaaaaaagtagacccggaaatattcactgaaaaaatatacgaaaaggcaagcggaaggatagagtatatacagccggattataaacttgaattgtcggatatagatgaaggaagtaaagacaaagcagaagaggataaaaatatagattcaaatgatagtgataaaactcttttggaagatgagcgaaataaggaagatattcaaaaggaaaataaagaaacagaagatataagtgtggacttagaagttattgaaaatcaggctgagaccagtgaaacagaaagccctgtacctgaaacaactgagacttccgaacctgagaatgtagaatctgagactgaaaatatagaatctgaaactgaagagaatgaagaaattgatacggaatcatatgatgatttacagaatgatatacagtcaggatggcgagtaaccaaaggcacgggagttaagattgcagtaattgatagtaaagtagacattactcatcaggatttaagttcacatgtagtaaacggatttaatatagtaaacaatactgaacttacatatgaagaaaaccaaataggacagtattatcatggaacgcatgttacgggaataatatcgtcaactgtgcccgaagcggaaattataccaatagcggcatttgagaatggacaagcgtatacaagtgatttaataaaagcgatagaatatgcaaaagaacagggagcgacgattgtaaactgcagctggggaagtgcagataataatcaggcattgagagaagcaatggaaaacagcggactgttatttgtttgcgcagcgggaaacagtaggacaaatgtagacgaaacaccgatatatccagcaagttttgatatagaaaacgtgataagcgttacatcattaaatgaagatatgggatttagctactattcaaactacggaaacaatgttgatatagcgatgtatggaagaaatgtaagaagcacgcttccgggaggagaatatggtgagcagagcggaacatcaatgtcagcagcatatgtcacagccggggctgcaatggcagaatcaaacggagttcaaaatataaaagaaacgctgctgaatacagcggttaaattatctaatttgaaagataaagtaaatagtcagcgaaagctgagttatagtaatttaggaaacaatataatttcagatgagataatagaaatatcgccgaaagacgattttgatgtcaacggatatcaaagaacaccggaagaaaattgggaactgtttagctcacttaaaacagtacaagtagaagccggaggaaacaacacagcatttataaagagcgacggttctttatggatggcaggagataacacatatggacagttgggtaatggaacatatgagaattcagctgttcctgttcaggtaataggcttgacagatattgtacaggtcgcagttggtgaaaggcattgtatagcactaaacagcagaggttatgcgtatttatgggggtataacggatataatgcagtatcgttttcagataatagaaaaatatcattgcctgttatgcacacactatcaaatataacttatgttgaagccggctcattaactagttttgtggttcaggggtttaatggtatatatgcccagggagataactcatatggacagctgggaaatggtacaaaagatacattagctatattaacacatatggaaaattctaatggagctgatattgttaaatcatataataaacatacatttttcattaatgttgtaactgtatttgcctgcggagcaaatgaccacaatgttttgggattatcatatgctggcactacacttacacctgaacctgtatcaataagtatagatatagatactggatataaccatgcagttgcaatagatgagacaggtatgattacagcatggggaacgaatgattggggacaatgtggtaaagggatagacggcaaaggatatatagatatatataatgcaaaagatgttaaatgcggcaaagaacatagtatagttcttttagaagacggaactgttatgacctggggatataatctccgcggtcaaatcggagacggaactcacaataaaaggtacgagccttacgccgtaaaaggtatgactaatataacacagatagcagcaggaaataatcatactgtagcattggatgcaaacggtaatgtatggcgttggggagataattcatatggacagtttggaaacggttctacagtatcatcaaacagtcctataaataattattacggtgatttggagcataaaaatataagcagtggttctaatcatatattatatgttgataaagatggtaagttatttacaaaaggcgataatacatacggacaattgggaacgagtgataatgtatcgcgtgaagattttgctgaagtccatgggccttggggaagtaaaaaaatagtgaaagctgaaacatgtgcggatacttcatttgttctgacagaagataataaggtatacggatggggtagaaatgacaaatatcaattacatgacaatactaatattgataaaaatgttcctatattgattgcaatcgcagtaattgatgtagcggcaggattagaacacgtaattgcactttcaaaaaatggcgaggttatggcgtggggagaaaatacttatggacaaattattttagacactatatcaggcagcagttatacacgacttttctcaaatgctaaaaagatagccgcaggggattatcaatcgtatataattgatgaaaattccaatttatatgcattaggaaaaaatgacaagggacagcttggaacttcggatactgaaaataaaagtcagcctgcgtttgttatgaataatgtaaaagatgtgtcatgcggaaataatcatactgctattttgactaacagcggaaagctttttgtgtgcggagataatacatatgatcagttaggtataacattgccaaacagtgcaacatataccagcagtccaacagatacaatgctctttgcaggagagatatttgccggagccaattccactgcatatatggctgatggaaaagtgtatcaatgcggtagtgttgctgatacacagaataaatcatatcaggctgtagaaggtttaagcgacataactgaagttgatataggagaaacatgtttggcagcaaatgcagacggtgagttataccgttggggaaatatggctgccggtaaatctttgaaaaatgatataacagtaagtcctgtagaagtagattatccatatgcagtaaaacaagtagattcataccgcacgcagaccttggcaataaatgaactcggacaagtaatcgcctggggagaaggctattatgcaaacggttcggataaaatggaaacaaaaacatacccgactgtgattgagggaatagaaaatccaattcaggtgagccgcggtaaaaatcataatttggtgctggataaaaacggtgatgtatggtgctggggaagcaatacgaataacccaatgggaacgttgggaggaaaggtaaagaaagcgtctaaaatgaccggaatttctaatgtaaaacaaatagcagccggaacagagttcagcatatttataaagaatgacggaactctttggggagtaggcaaaaacgataaaggtcaaataggacaagggaatacagatgattatttaacaccgacacaaataacggcaatgaagacttttaaaaaggtgagcgcaggagaatcatttgttgtagctttagccgaggacggactgtattcatggggagcaaacacagacggacagattggaaacggaacaacggatgatgaatatatacctgtaaaactgaatgcagaactggaaaacggagaatattttactgatatatcagcaggaacaaacttctgccttggtttaactaactttggcaacgtctattcatggggaaataacggaagcggaaggttaggattgggagataaaaataacagaaatataccaacaaaaatagttggtataacaggaataaaaaatatttctgctggtgatagcagttcattagccgtaaaaaatgacggaacagtatatggctggggatatggttcagatggacaattgggattttttgtaacaggttcaacattaaacccaaaagaaataacgacattaaacggaaaaaacataaaacagacatcatgcggaagagccttttcagtagcaataagcagagatggaaaattatattctttcggtagaaataattccgggcaattggggatatattcttctataccggtaaaagttacatcaaatatgataaatgatacaaaatggttaaatggttatatggctcaatatttatctccgatcgcagtaagtatggttttgccaagcagcgcacccaatggaagcaaaatagtttggaaaagcagcaatacagattatatattggatgatggaacttttattaagcggccagatcgttgcagtgatgatatagaaataaatttgtctgctgaaataagcaataacactgaattatttagcacttgttttagttatataatagaaaaagattcttcactcagtactgatgtttatataagtgcgaaaaagggtgatatatcatcaattgttatttcaaatgatgagaataacaacatgttatatactataacatttgattctgatatttttgaaattgttgatttaattgggattacagatgagcaagatattcttcctggctgtcaaaacggaacaattaaaattgaaagtgttgataaaggtgtaattacttttaggtattcagcaacaaacaattttaatggttatattaactgtttaaaattcaaagcagctaaagacgggaatactgaaattaaaataacaaatattatagaataaagtgagggtattattttgagaaaaataatttcactattcatagcaataatcattttgcttggaatagtacatataaatatttttgccgaaggaaacgtgcagaatgaaaatatagaaatgttttcaatgccgcaggatgcaaaatatgctgaaaatgaggttttaatacagtattcgcctgttggaatgtttgcagatgaatctgatgttagtcctgaattaatgatgtcagaaaatcttgaaagtgtatcaagtgtggaacttatagatacgttaagtgttgataaggaggacggaagcatattaaaacaattacatgtcgaaaccgaggatttggaaaagacaataaatgaaatgagacaaattccaggtgttgagtatgtggagccaaattataaattatatgttgcaaatactgattacgacccgaattttacaaaacaatgggcatataataatccggtgtataatataaatgttgaaaatgtatgggaaaaggtgtataatgataatatatcaaaaacagaaactatagtcgcagttttagatactggtgttgatatatatcatgaagatttaaaagataatatatttaaaaatcaagaagaaatatatgggaacactgaaaaagatgacgataataacggatttgttgatgatattgctggatgggattttttaaataatgataatactgtttatgacaatacaacagattcaactggtgaaaaaacagatagtcacggaacacatgttgcaggtattattgctgccgctaaaaatggagttggaatgcaaggggtagcatatgaaaatgtaaaaattttgcctgtgaaatttattgcgggaaaagagggcggagatctttcagacgctataaaaggaataaaatacgcagagaaaatgggtgcatctattgttaattgcagttttgcaagtaataatgaatttttaacactaaaagatgttatgagaagaagtaaaatgttatttgtatgtgctgccggaaatcatgggactcagctaaaagaatatccggcaggtttcgcagaccttgataatgtaatttctgtatgtgcgttaaatcaagaaggagatttaacatcttttagtaattatggacatgattatattgcagctccaggtaaagcaatatacagcttagcacctgaaaataactatatgtatatggatggaacttctatgtctacaccgtttgtagcaggtgcggcggcattgcttaaaataatcaatccgagtttagattcaaagcaattaaaagacgcattaaataacggtagtaagacttcggagacggggctttttcatggtaaattggatattttgggagcgtacgagaattctcctttgaatcctgatgagggtacattagtcgccggaataaaagaatatggcggtaaaataataaaccatgacaatagtatatatagattggcaggctgcgatgaatccggttttatgaacaatattgctgtttataaacctgatctaggagtatggagcgatgttacttatttgcgtgaaggcagaatatttgcagcgcctgtttttattgacagtactatccggttatgcggtggaagaagtatattaaaaaaagatcttgatacaacatggacatataatatacatagctattttaataatactattaaaactaatacaggttcttattatatttatgctaaccgcagtgccgctgcaggagtaggagcagagggtaaggtttacttttttggaggaacatctgatggcagatatgctaatgatgttttatctgctaagccaacaagcagtagtgattttcgatgcttaatgccggaaagtcgcgggtatgcctgtgctgaatatctaaatggagatatttatctttttggaggtgcaaatgaaaacggatgtttaaccagcacatataagtatgatatatcagaaaattcaataaaagaatgtgcgccaacaaattattatcataataatgctgcatctgctgttattgatggaaagatatatgtttttggcggaacaaatcagtataccaaagacggacatgatcctataaccgaaaataatggtattatttcagatgtacccaataatattgttgaagtatacgatccaaacacaaatatatggacgcgtattgcggacatggacgcggcaagagttggtcactcagctgtgttttataaaaataaaactatacttatgggcggatggaatggagaatatcttgattctgtagaatactattggggcagtgaagcccctaaaaatgtgaagtccgctttaagcatagatatgcagtcaacaatgttgtcatggcagcctgtaacaggagcagattcgtatgagatacagattggagacagagagcctatattcactgctgaaacaaaagttaattatttaatatctgaaccaaatgatgaaaattttaaggttcgtgcaattaaaaacggaggcgttagcgtatggagttcagaaagaaaactctatcctttgggaactaacataaatgatgcaataaaattaactttgaatgtgcctgtttcagatatattaaaatcaaatgaaaattcaaaatattataagtttgaaatagatagtttaacaaatattgatattaaactattcggtatacctcaaaattttgatggtggttttgaaatattagatgaatatggtttgcatatagcaagcggttactcaaaaaacgggaatattatgattgaaaataggctgatgacaacaggcgattatattatcagagtctataacgtgccttcagatggttcagatttaaattatacacttgaggtttcagaatattatactgaagaaaccggtaatcttccgacaagggtatctcaaaatatgttaaactcggttgatatgtcggtttcaaatacaaattatacaattattgatgacggaacacttccggataacagtatgtcaatagaaatggaagaagataattcaggtgagtttggaacaaacaatacaacaaccgtttattcaggaactggagttttaaataaaaatgttttgagtaaggtgtttacaataaaaaatgtaaaaagggggtcactgataattgcagttgtagaaccgccgtcaggatatgcatatgttccatattttatttcgaacaatcttgactcttcggtaggctgtttagatccgtacaataatactaataatatagcatcatcgtcctttttagctaagagtgatggtagttattctatcagagtcgtgtgtagcaatggtgagtatgaccctcaagggggagagtttaaaattaaagcgtttgtaaccaccgatccagaaaaatttgaatcaaatcagtggcagatgggggcaaatgataaggaatacggagacaaatcagctgttaattttaataaaattgaacaagcaattggaacaacaaataagcctacttctggtatagacgcaaaattttctacaacttctgatatagatacatatccaattgaggtttcgcagggtgaaaaaatatctgtctcacttgaagtagacaaatctgaatatgtaggctcatatacgataagttttcagactaattttaaagattttaattatcgtgataatccagatggtgtttcaaaggactttaacataacatatgaaaggactgattgtacaaatccgtataatgtaaaggcatataataattcggcatttgcttcatggattgttcctaataatttagtatcaaacacagcatatatcgtggtacagaaaaataaaaaatcgatggatataggaagcgaagtaggttatcatttgataataacaagagtatctcctgaagaaatgaaaaaagatgtaaatgaaaacagtacatatactccttccggcaagaaagcattaaacggagatgcagaaacatctgcggttacaccaattacccgccgtaatgattttattaattttaaaaataataaaaattcagcgggcaagcttactcagcaagtatccggcaccggtgtgatagacagtcagctcgacgtggattggttccattatgaaggcactgttaatactcctaaccgtgttgtgttaaccactgaagctgataatttgaaactagcgctttatgaaaatggttcaaccagggaacttgaaaatggtgatacagttaattttaaaacttctgattactatataggagtatacgctgaagatgaaacatatggtcaaaatcaagcggcagattatatactttcggtaatagatgactcgaaagaaaaacaggacgtgcatatagttctttatgattcgggttacggaggaaatggtttctatgatggtcaaattccaaggtactatgacagttcaggaaataagttcgaatactcggttgaattctttaaaaaatatcttccgctgctggttaataaggatgtgtatttttcagtttcaatcagagacctggattttgacagggtatttctgcctgttaacaacataggagatttaagaaatgatccatttatttttgataattatgacaatctttcaggcagcggacagcttgagcttgttaaaaacttaactattgacagggttaataatgtatatgataatatgatagcagcatacagaagtctcccgaattatcaaaagccgaaaacaatgcctaaaatatatattggaactccgcactatacaggctggcagattagaaattgggacggtacaaatatagataattatgttttaaaatatgatgaaatagtcagaaatatttatgagggcgtacggtcacatgttattgctaaatcaggaagcgacaatgatatagctggtttatattacggcaaagaggatccggaaccgtataatacatcttttgaatatacaaaaataatgcggaatacttcctcaatgattcacggagagggcaaaaggatgatttggatgccatataccggcggaagtataactagtgtaaacaacgtatgtgatattgccaatacatacaattatgacgggaaaaaactatgtgatgtaatagtaatccagcccggatatttttactatgaggtcagcaatgacggcagaagcgatagtgaatatcctgagtttatgcagtatataagggatatagtgtttaataatgataagaattcaggaacggatttgtgtttccaaatggaatatgattcatctatttttaccggaagaatttataaagatatgtcatcaaatccaaataacaaatcctatcgttttgctaagactcttgatattttcaaatatttattaacaacgcctgaatattcatttggaatttatgctggcgggcctaatgaacagggttacaatatgaataaaatatctgataatgtaaacttacacagtaaccgtaatcatataactctttatgaaaatgatggtcattataaaacttataaagatttaacagatatagcaagtaattataatatggcgtataataccaaaattacatatgatataacagcagggttgttatttaatggatggtcgtcgcaagtcagggataatatacatcgtgtatataatgaattatttgaagagagcagagttacgctttactaaaaaaatgtaggaggagaaatgtatgaaaaaatttataacaatagttgtcttattattaatgtgtttaagtataaatccggtaaaagcacagagagttgaagaagaggagaacaatataggtacatattttcagcttggaacatacgaagatgatccaataatatggagatgtataagtgatgatgacgaaaatggaatgcttttgttgagtgataaaatattgtgctataaagcatataacgcaggtacaaatgttgatgattttttaagtcaggatatgtatggctcagatatatgggaaaacacaacgataagagcgtggttaaatgcaatagaaaatgcaggtaatattatatggccgggtaataatcctcccaatacaaaagtaccattatcaccattcatgccatatgtagatgaagatggatttttgtctgaaagaaattttagcagtagcgaactgtcagttattaaaacagtaagtcaatggcagatattaggaccaaaggatgcggagttatcaactaacggattaaaaaagtgctttcaaacaaactattatccttttattagtccatatggtccatataaaatgtttgactcatccattagaaattttagtcatatagaaggagcaatgtatagattaagtgatacaatgtttctgattgatgaagcacagatatataagttatggacaaatttggggacagtaagggcatatccaactcaaagggcattcgacagtgttaaaaatgataaagattattatgaaggatttgaagaggaatatatgttaaggacatccaacagaagcgcacaatttatatttggtgacgatgattatagttcgggaatatgtgcgtatagttatggagtgagaccggcattttatttagacacaacaaaagccgagattatatcaggaagcggaagtatagaagaaccatatataatagacggacagcctcaaacaaatgcagaagtatactgcaacggagagagaatgcaatttgatgaagaaccggtggaggaaagcgaaagattgctggtgccggtaagggcaatatttgaagagcttggagcagaggttgaatgggaggaggaaacacaaataatcacagcaaaaaaagaagatacaacagtggtaatgcagatagataatccggagatgggaaacagcagagaagtggtaacattagaggtgccgccgaggttggttggagagagaacaatggtgccgctgagagcagtatcggaagcgtttgaagcgaaggtagactatatagaaaacttaaatcgagtagtggtagaccagccgaaactgccaatggattttggagaaagactggaaataccgatggaaaattggcagcgtaaagatttcgagagcatattccccgactatgagccgttttaacgaaaagtgtaaagggtatgagaatatcataccctttttagcggaggaggagaaaaatatgaaaaagtttataactatttaatattattgcgtatctttttatttataggatagaaattaataaataacaacaaataggcttcttaaaaatttataagaagcctatttctatttgtttatataaagacataatttctatttaccaattgggaaatatggcaagaaaaacaattggaacggaacgtctcgaaatatattgatatgataaattaggaaacaatatttctgcaactgtaagcaaacaggacggtacagaagctattacaactcaaaatttgtatgacagccgcggaaatgtaagatttgaaatggatggcaacacaggggataaacaaaaggaaataccacatattatgaatatgatgaactgggaagactaataactacaagccagaatgttgaaggagttttagaaaccaacagatatgcttacgacttatttggaaatcttgagacgcaaaccaatggcgaaggacatacgactacattccaatacaatatccgaaatgaaatgaccgctaaaattgaccatggcggcataggtatagcttcaaagacagaaagctataagtatgatgagcgtggaaatgtgacagagaaaaccgatagaaatggtgtaacattatcttttgtttacgatgtgcacgacaggcttacagatactaaactcggcgataatgtcttaatacataatacgtacgatggagccaacaataaactgacaatgcaggacgaaagcggaacaacaactagaacatacgacaaattgggcagagttttgaccaaggatgttcccggtattggaacaacgacttaccaatatgatataacgccattgataaataacggagaagtatcagaaaagactgttgatccaaagaaaaacgtaacgataaagacttatgataaaaacaacagactgcacactgtcaaggatgcagaaaatgcggagccaacaacatatgaatattatttaaacggcgctcaaaataaaataacaaatgcagacggttccaaagccgaatttgagtataatgacgacggaactttatcaagcattgtgaacaaaacttctgctgatactataataagttcatattcatatgcgtatgataaggcaaaaaatctgatatataaagaagaaactgagtcaggtgcagacaagggtgcaacaaaatacacctatgatgaagcaaacagattaaagacggtaaccgaaccgtcaaataagcagacgtcctatacatatgacaaagccggaaacagaaagactgaaacggttacagaatccggaataatatcattaacaacgtataattataacgaacaggagcgtctgacagacactgttcagactgttggaaataccaaaaagacggtatcatataattatgataataacggaaatatacacagcaagttccaaggagtggaaaaatcagacgacggagaggaaacagaactggaaataaagctgctgggactagatgatgactcagaaataggtgcggtatatgaatatgacgtgttcaaccgtctagtaaaaacatatcagggaagcaacgtaatttccaatgtatataacggagaaggaaacagggtatctaaaacagtaaatggaaatacttgcaaatatctctatgagtatgataaaatagtgttagagacagacggagacggaaaccaaacagcaaggaacgtatatggaacaaatttgataacaagagagtctaatgataaaaagtatacgtatcattataatggacatggagacgttacagcgctaacagaaaagagcggaaacattgcggcagcatatgaatacgacccgtttggaaatatcacaggagagaccggagatatagagaatccatacagatacagcggatacgaatatgataacgagacagagttatattatttgaaatccagattctatgatgcagaaacagcacggtttatacaggaagatacatatagaggagatgcgagtgacccgcttagtttgaacttgtatacatattgtgcgaataatccaatgacatatgtcgacacaagcggacattcatactacgggacaaagtatgattcttttgaagaattatatgcggcgactattgagaatcctcaggaagtagaagaaatgctgtataaattaaatgaaacagaagaagggcgcgaaaatctaggatatataatcaatgcgtatgtatatgctcagggaggtttgcagcagggaaatgacagtgtatttcaggttatatacgcaagcgcaccgggcagatcacgtgatatgactgtaggaagtaatcccagtgggtggataaattcagaaaaagacatgtatgacaactatcagtttacgatatttgatgctctaaactggttaatccaaacagggggaagcggtaactttgcattgcagacaagaactacagatgatccgaatgtagcggcagacgcaatgaaaataatagttggtaagtttatggacgcaagaaactttcttcgttccgctggaataattgataatacagtaacgccgcaattatacataggtacaacggaatatccaactgaaaactatgttgaagatacaaaacagatatatgaaagtattacgggagaatggtggattgatgacagtataataggcggaatatattacggtaatgaggaaggtaacgatgttgatgagatgcgtatgatatctgactatatacatgataagaataagcagttgatatggaagccatatatttcgaaaattaataaagacgttaatagtattctggattatacaaagtataaggataatagagggcggccattattcgattatatatttatacagccaagtttatattattcttctggtaaatccgaaaattataatatgcttgaaactgtttataatgctgtattagaatataatgttgctaataaaaataatgataaagagcataccaaggtcggaatgcagatagaatttgatatgggacttgtgacagggcgtaatgatgcaagcaatacagcaacttctttacaaaagagacaatttcttaatgcatatttaaaaaaggtaaaaacacttaaagctaatggagttcccataagtgtatattccggcggtccaaatgaacaaggatatgacaatatatatggaaataataatacgcataacaatggtaaccatataccatatgaccagtcaccatccggtatgcggtacagtgatttccctgatgcttatacaggcggaaatttaatatatgatgtaaacaattacatatataacggcgtggacaaatggaaagatgaattatcaacatctatttggttgacaaaacctgacaaatgataattaaataaggaggagcaaaaaatgaaaaggttaataattatttttttgagtttaacaatagcaacaggaagtatattatttgtgtcggtaatcgcaaaaagtaattctaatataattgaatctgaaaatttaaaaattgattgtatgcaaatgggagaatactttattttaggaaaatataatgatgagccaatagtatggagatatgtggcggatgatgagaatggtaaactcatagtaagtgataaaatattgtgtttaaaaccatttggagaaaataatttttgggaagaatcttttccaagagcctggttaaattcagatgttgcggaaggcgaaaaagaatggagttgggcagtcaattacaataatcttgttatagatagtgcccaaattcctactaacgagaaaggatttctaaatgaaagtaatttttcaaaaaaagaaagaaaagtatttaaaccggtaacgcaatggactatgctgccgttaaatcatcttgatttagcaacaaatggggagacaaaggtatatacagcgctaaaggaatataggcagggaagttcgatagagccttcatattttaaattctatagtgtcgaagaattgccggaggcatatcatggagcagcgtacgaagtgacggatgctgtgtttttaatggacgaaatacaaatatataatatgtggaaaaacttaggtgaagttaaagcggtattaggagaagattgtgatccattatttacaaagtcgagtgaatataatgattattttttgcgtactgcatcagaagatgaattgggttgcacttctttggatgaagatggagaatatgggcagtattcatgttatttttatggcggaataagaccggcattttacttagatgaagataatgcagtaatattatcgggaagcggaacagcggaagagccgtatataatgacaggaaaagaaatagaagtatatacaaatgggacaaaagcagaaatgagtgaccaggcaacaataaaagacggaatagtaatgttaccggtgaaagagacatttgagaaattaggagcaaaagtaaattgggatgaagcaacacaggccgtcacaatagaaaaggatggaaactacatctatatgttaagagataacaaaggaataatgataaatggagaaatatacgacttaggttatccaatgacaatgatagatgatgtagcatatgttccgctgacagcgatagagatgtcaataacaccgaacgtaacatggaacggcgaacagtatcgaattgatataaattaataaattgtataaaatttttagttataggatttaaatgaataaataatgacaaataggcttcttataattttttaagaagcctatttctttttgtttataaacctaaaatttatttacctactgaatcttcaggtacgtatccagctttgataatttcttcaataaataaatttaggtctataccaccatttattatgatattaattaaactcttaaaagacgggagtcttttcccattttctaaatctgtgtattgacgtggcgatagacagcatttttccgccattttctcttgatttaattttagttccattcttctaaagtatagtgttttactaaagcacttttttaagatattcatcatttcactcccaatctataaaatatgtgaatattctatcaaatatatatttctaaccatatgagatatattgcacatgagccttgtttttcagctatccaagtaagcggagatatggtaagatgttaaaaaaagaacaaatttggaaacagtaagaaacataatatgcgataatgaacaaaatagtattaaaatacaacgatttcggattataatgaatacagggatttagtgaaaagttgggactctaattctaatggtaataaaaacaatgacatcggaacgtatgtaacaacaaatttagacagcaacacgataagagtagaaaaaacatattgggataagttaacaattattattttactgattttaacttcagataatggtaataacggtagaatattagatgaatgttattatatagagtttaacaattaagatcctaattttgatacttattgtcagggcgaaactttacatcattgtctccatttattaattcatagttgtaagatcttatcggtggtttggtatgcaaattgtttttattaatgtctgaataagaaatatctttaatatcaaacctcggtatattagtaacagcaaggagcatatatcaaagaaaggatggtagatgggtatttaaatatcaaaatgaagaaatggtcaagcctcattatggctatgataaaacagaatccgcagtaaaaagaaaacttagagagtataaaaaagaggttgcaaaaggcaattttgaaacacaagattcgtatatgttatttcaagattactgtttagactggttaaatagtgtgtataaaaataaagttgttgttactacattttctgaaagattgcgaacaattccatttaaatcaaaggcaatagaagtaatagaaaagataatataaatacagcaaaaattgggtataacaagtaatagaataagtgctacattaaatgatacatatgtttcttcaagatcatttatatatagaattaatgatttgctgaaaagtatacaatcggaaaaggagatagtatctcatgggttaaggcatacattcgtaacattatctgcggatgctggagtgcctctaaatgtagtttcaaactgggtaggtcataaaaatgttgaaataacacaagactataatcacattttaaaaactcaagtagataaaggggtagcattattagaaaattggtgatgaaaagcagaacggtgtcaaattggtgtaaataataaaatgagactttagaaataacgtttttacggggatgtttgtattttgtgacatttttattaattttgtacaatttgtgttgcattatttgaaattttaagttataataacaattaggtaaaattatctgtacaaatatatttgcagggggtgtcgaatgtgcagggcagagtatttcaaaatacgcttgtacaattgaaaagagaagttcaaaggacgctgggagttattgatgacagcgacacaatcatcgcgtgcagtgatgaggataaaatcggaaatactgttgataatatttttacagttttttctgctacaggtgaagtaaagacggtggcgggagcctgctataaaaaaatagaaacattcagtaagtgtgagtttgttgttttctgcgagggagacgacgatattgccagaaatgcgtgttcattccttgctgtgaactttttgaccattaagcagtattatgacgaaaaatatgacaaggcaagctttgttaaaaatattatcgttgataatgttctgccgggagatgttctttatagaactaaggaacttcatattaatgttgagtgccccagggttgtttatttaatcagggttgttgaggagaccgaccagggataccttgagatattaaacaatcttttccctgataaagcaaacgattatgttatccgtgttgacgagcgggacgctgttgttgttaaggaatttagaacagaacctactaaggaagaaattatggttatcgctcagaatatttttgacactttgggcgctgaagctatgattactccgctcattggtatttcaactcttgttgaaagggttcaggatttgtcccaggcgtatagggagtcaagaattgcgcttgaagttggcaaagtgtttgataccgagaaggatataatcagctatgataatttaggaataggccgtctgatataccagctgcctacaactttgtgtgaattgttcctggacgaggtatttaagaaagaatctattaatgtgcttgacagcgagactatatatactattcagaaattctttgaaaataatcttaacgtttcagagacttcaagaaaactgtttgtacacagaaatacattagtatataggcttgataaaataaagaagcttaccggtcttgatttgagagaattcgacgacgctattatatttaaggtagcgatgatggtaaataaatatttgtcatctcagccaactaggctttagtatgtaatttgtgcggctgaataaatttaggccgtggataatatgattaattagtgggggcggttttaagcgagttttttgtcgctttccgcccttgtggtttattattttgattggaggaattacgatgagtaaaaaggctgtgaaggttactgctatagttatagcggcaatatttttaattggtatttgttcgggcatagccgcgtcatttttgttttaatggcataaatttgtattgggattatttatactaaagcggatgataatgttattcttatgatttaagaatacttttatgatccgctttatgaatgcggataaattttgcagtaaggttctttgattttagtttggtaatatatttttaaggagcagaatatgtatataaaaaaacgggtattgattgtttgttcggttttattaattgttgtgactgctgtgcttaccgtaggtcttgtaaatccttttggatttacaaattatcttgactttataaagttttcaacagttacaaacacaataaaaaatatgtattatgaagacgttcccatgtcggattatgtaaacagctccattgagggatttgctcaggggacagaagacgcgtatactaattacatttacggcgaagaggctgatgaatatatggaagatgtcagcggaagctttgatggtattggcgtgtatatagaaaataatatcgaagacaatacaataaccgttgtatcagctatatcggacactccggctgaaaaagttggtttggtaagcggtgataaaattttaaaagtagcgggagtaagttataccggagagcaaatcaatgaggcggtcagaaatatgaaaggacaaaccggaacgactgttgatattgaggtcttgaaggccgagtcaggtgaaacggtaagccttacggtagagcgtcagcatattaacgttaaaacagtaaagtcaaaaataattgacggaactaatataggctatatatcaatatcacagtttattgaaagtaccggtgatgattttaataaggctttgagcaaattaacttctgacggagctaaatctttggttttggatttaagaaataatccaggcggatatattgaagctgctgtggatgtcgcatccaattttgttaagagcggtgaagatgtggtatacactcttgataagaaaggaaacagggaagattataaatcaaatggaaagcagtattatatacccgttacggttcttataaatcaaggttccgcatccgcaagcgaaatagtaaccggggctttgaaagattatggattagctcatgtgataggagaaaaatcttatggtaagggaattgttcagtctgttttcggtttaggtgacggaattgtttctgtaacaattgcgagatattatactccgaacggaacttgtatccataaacttggtatagaacctgatgagacggtgcctatggaattaaataagtacgctaatcttgataacttaactcttgaggaggatgaacaattatctgcggcagtgaattatttgaattctgtttcaaaatagcttttagaaagaaataatactaagattggtggagtgaactatgtcattttttaagttcatctcacaaaagataaaagatttatattattttataaaaaaactgttttataataaaaaaatactgattgaacagcaagaccgaaataagcttacggaaaaacagactgcagagtatccggttaaagtgccgattggctgcgataatattgaaatatcaattaaatatgttttgagtcttttgaatactcccgggtttaaagcaggagcaggtataatcgttgacgatgtcgatgatttaagagggcttaacacagtaatgaatttggtttgcagagagtttaaatatgtaacgatatataccaagaatatttcagccggcaataagactgcagattatgtttattcaaaatttggtcttccgattatggtgctggatgtttctgaatcacaaaagtgcagatatcaggtaataattgatttcaataacggtaagctaagatgcggaagagatttatgcgttaccgggaccgcaaaggataagaatggtgataccgtgggattatatttgggtgagcgtttggtgacagtataaaaagacataaatataattaatgtgtattgacattttatagttattaaagtataatttataagttaatcatagaaggtttagttgatatataaaaatatcggaggtaataagaatggacaataaacaggtaaagttgactgaggacggtcttaagcagcttgaggaagaacttgaatatttaaagactaaaaaaagaaaagaagtttctgaaaaaataaaagttgctcttggatttggagatctttccgagaactcggaatacgatgaggcaaaaaatgaacaagctcaggttgaggcccgcattgtctctgttgagaatatgctgaaaaacgctatagtgattgatgagagcgaacgcgatacgtcaaaagttgaacttggcgtaaccgttactattcacgatattgaatttgatgaagatataacatataaaattgttggttctacagaagctgaccctgatgagggaaggctctcagacgagtctcctcttggcaagtcacttatgggaaaggctgaaggcgaaatgattgatgtggacgcgcctgccggagttattcaatataagattttaaagatttcttaattttctgagcgtatcagaataatagttggagggaaaaatgagcgagaataatcaacaaaagaataatactgaaagtgatttgaacgaggttttaaagattagacgtgaaaaacttgcagtgctgcaagaaagcggtgctaatccttttgaaatcacttcatatgaacgaacagatatggcaggagacataaaggaaaattatgctgattttgaaggcaaagttgtctcaatagccggccgtcttatgtctaagcgtgtaatgggaaaaatgtcgtttgcagatttggcagatagaagcggaaggattcagctttgtgttaagcgtgatgaattgggagacgacgaatataaggtatataagaaatatgatataggtgatattgtcggagtgacaggagaggtgtttaccactcaaaagggcgagatatctgtaagagcatctaagatagtgcttctttctaaatctttgcggccgctgcctgaaaaatatcatggtcttacaaatacagatttgagatataggcagagatatgttgaccttatcatgaatccggatgttaagagaacgtttgaactcagaagccgtataatcagagctatcagaaactatttggacagcagaggttatatggaagttgaaactcctattctcaatacaataccgggaggagcagcagcgcgtccatttattactcaccacaatactttggatattgatatgtatctcagaattgcgcctgagttatatttgaagcgtctcatagtcggcggttttgaaaaagtatacgaaatgggaagacttttcagaaatgaaggaatggatgttaagcataatcctgaattcacaacaattgaactatatgaagcatacaccgattatttgggaatgatggagcttactgaagatcttattaaaactgtagcacaggaagttttgggcacaacaaaaattacttatcaggatgaagaaatagatttaggtcagccgtgggcaagaatgacaatgcttgagtcaataaaaaaatatacaggtgttgatttttcacagactaagacggcggaagaggcggaagaacttgcaaaatctatcggcgttgaatgtgacgctgacgcgcctaagctttcccgcggtgaaattatcagcctagtgtttgaggaaaaggtagaagaggaacttgttcagcctacgtttatttatgagtatcctgttgagatttctcctcttgctaaaagatttgcggacaaccctgaatttactgagcgttttgaaatatttattacccgcagagagtttggaaacgcgttttcagagcttaatgacccaatcgaccaaaaggaacgttttatgagtcaggtcgagaagagagagcagggtgatgatgaggcaaacatgatggatgaggattacgttaatgcgcttgaatacggacttcctccaactggcggtctgggtataggtattgacaggcttgttatgctgctgaccgacagcagttcaatacgtgacgtcttattgttcccgacaatgaagccgcttgattagcagttattttatttattagtgtaaaaagggatatttgcggagttaaatcacatacagaggtggtattatggacagagatgcccgtgaggctaaagctatgacaaaggaactgccggttaaagatagaatggcaaacttttggtattataagaaatggtggataatcggaattgcggcggcattaatagttgttgcaattactgtatttgagattgtgaatactccgcaatatgatttatatgttggctattattcagagacagctgtctccgatgaaactgtaaaccgcattaaggaaaccatgttggattttgccaatgatgtaaatgatgacggagttgtgacaatatctttgacgcctatgattgccagcagggaagaggagagcgacgagtttgttgcggttcaaaccagacttatgagcgagcttgattccggcgataatatgatttttattgttgacaaaccatatagggattatttgatgagcggcaataatgcagactgctttgattatgagctggatttaaataccaatcctgttattatggagaagataggttacagcggtgatttatatttgctggttaaatctttgtatgaaagagaatccggggattttaagaaacgagcttctcataataatgctgtgacaatttatgaagcgttttcaaatttttcgggttagaaatcagtgtttggggatgatataatgattattaattttaatgaaatagaagaaactgttattcctaattttaatggcggagaaaaaagtgttgcatcacatatgtttgttgacaaaaacaataaaattatgtacggatgtttggaacccggagcgtctattggattacatacccatgatacaagcagtgaaattatatatattttaaatggcacaggaaaagttttgtatgacggtgaatatgagagtgtatctgagggattatgtcattattgtcccaaaggtcacagtcatagcttaattaatgacagtaaaagtaacttagtgttttttgcggttgttcctgaacaataatatatttagggagatgtatttatggaggatgagtttgaaacagaaggaaaacttgatgagaagcagacgaaacattcacaaaagttattaaatgataaactgatttcaaatatatcatcattttttaaagttttgggagacgaaacacgtgttaaaattttgtatgcgctgtctcaaaacgaaatgtgtgtatcggatatttccgctatgcttgatatgtcgcagtcagctatatcacatcagcttaagcaattgaaattgggcggacaagttaagacgagacgtgagggcaaaagtatttattattctatagatgacgaccatgtggttgatataatcaacaagactttatcccatgttgaacataaaataaaagacggtcagctgctgtaaaagcagctgaccgtctttttgtatcttaacttgttttttattttgtcatgaaattatatatcattattgcagcgtctgcgcgggtaagctctccttgaggattaaatgtattatcagggtttcctcctatcaaaccaaatcctctgctaagcgctacatatccttctattcccggagatattaaatctttatctgcaaatttgcagtcaaaaatgtcgggcagttcagcaatgttttggtatccgagtgctctgattatgaacattgttccattctctcttgtgcatattgtttctgcgtcagcaatatctttatagtctacaatattgttattctttgcaaaacgataaattgtttcataatttaaaggtcttgggaatctttgacctttaaggattgaagcaaaagtaatcatttcaccttgagtgattgcttcatcgggtctgaaagaggtttcaccttcaggaagaataattgcattatatgcaagcaaagctgtgatttgtttttcagcatagtggccgcttatatcatcagcagtattggagttttgtgtttctttgtactcgtctccattataatttacacgtttgcctgttttagctgaaatataataattgcctgaacctttaagtttataaactaaatcagctgtgcaagttttgcctgctgacagattcgaaacataacagagttcaatgccaacagtattcattaaagcttctgcggcctcttcagcagaaatcatattctcagttgattcaaactcagttttgtcactccattgtttattaaaagaaattatttcgtttgtcagcttatcgacttttacactaatatattcaggtgagtaattaaatccgttaacctttctttcaaatgtaaaataatagttgttataataatccaatgattcgtcaatcttatctgaagcttcaaggtcgctgtcggtattaatatactctttgttagaatacttatctgcgaagcttttggcaatatcaagagcctgagcctcagtatattttggaactttatcaccataattgctggaatcagaataataatttaaaaattcaccggtagcggcattaaaagatatgcgcttcctgctttgtttgttattctcgtcatatttaatatatgttaagtcggcataataatcaaattcagactctttataagatttgtatactcttctataactgcatgacgcataattatcactttcaagattaagctctgtcattccctctgcaataccgcgaagctgttcggttgacattagattattcatctgtttaatcccctcaagctccttctctgtcaagccgctgtcactggcgctttcagcagccatatttgaaccgcctccgctacctccggacattactttgctatttgagtcagtgtattctttatattccccgccgttttttgcgtcaatttctaaatattgatttttgggctcataaacaaggattgctttattttcaccgctgctgatatatttagccgtcattggagacagattgttaaaatgtccgatagcgtctgattctgaaattaaattatcaggcattggaacttcgtcacaatatgttaaagaaatacgcatactggatatttcaccggttgatgtgttggtatataacgaagctgtatctccgcagaatggtaaaccgtttatgtaacgatgaaatattacagtcgtttcaggataacttatacttatacctgaggttttgccgctttcgaaactgaactgagatatcaaatcggggtttagcttttgtaaaaagtcgtatccaatttgtatcagctgttcttcagtataatttggcagtttggcgtctccgttataatagtagttatttctttcgcttgtagaatattttgttatatttccatattggtcgatagtgatgttaatatatttggtttcatcgttttcatctttcagtgtcgaccattttaaatcatagctcgtgacgcctctgtcagacatcaaggtatcactttcaaactctgaatactcctgtggtatctcaacccttgattttacggttagaatagcagattccagcccgtcaatattttcagcgtaagccggaatcacagcaatagataaagccataaaaattgataaagcaaaacataatagttttttcataaataacccacctttataatataattttttaattgttctctagttttatcaagatatatatttgactgttttattatactatttgttcccgtttttgtaaaatataggacattatattttttaaatattttaaaaagctattgacaaatatagtaaggggtgttattataacattataaacatatgaacaattgttcatatgttgaataagatgtatatagaagaggtgaccaatatgaaaaaagcaaatttgccggaagataaaaaattatatgagtgtgattgcggctgttcagtgcaggaaggcggcggtcatatacatgaacatcatatgtatgacgataatacaagtaatatccataatgaagattattctttagataaagatttaaaaggcgataaggctgagaacaattataaaaatttaataactaaaaaatatactatagataatttggattgcgctaattgtgccgctaaaattgagaggatgtccggtaacattccgggagtcgtcggggtcaatatatcgtttcctttaaaacagattacggttacggcggaaaatccggataaactgcttcctgaaattatacgggcggctcagaaaattgagagcggagtagttataaaagaagacggcggaaatacaaaaagcagaggacatataaaagaaaaccgcaaagatattatttctattgttaccggtgcagtgctgtttttaggaacgttaatattcaaagccatactaggagttgaggattacaatattgtaacggtttcgattcttatcatatcatatttaatacttggcggcggggtacttttaacagccgtgaaaaatattacaaagggtaaagtgtttgatgagaattttttgatgtctgttgccacgcttggagcttttgtgattggcgagtatcctgaagcggtaggagtaatgctgtttttccgtgtcggagagctgtttgaaaagattgctgtaagcagaagcagaagtcaaattatggacgcggttgatttaagacccgagactgttaatcttgttgcagataaagaagtgaagattatacctgcagagggtgcagttcccggcgatttggtgctggtacggcccggtgacagggttccgcttgacggaatagtggttgagggtgagagccggcttgatacatcggctgtaaccggcgaacctgttccggtgaaagttaaacccggtgatgaaatagtgtcaggatgcgttaatacatccgggctgttaaaagtgaaagtaagtaaagttcttggagattcaatggtttccaggatattaaaatctgttgaggaagcggctgcaagcaagcctagaattgaaaactttataacgcgttttgccagaatttatactccgattgttgttgctatagcggctttcacggcgatttgtatgcctttaatactgaatcaggatttttatccttggatatataccgcgcttagcttcttggttatgagctgtccgtgcgccctggtgctgagcgtgcctcttgcttatttttgcggaataggcgccggttcaaaatttggaattttgtttaagggcggagtggttatggaatctctgtccaaaataaaagctgttgttatggataagacaggaacagtgacagaggggaattttgaagtacaaaatattcatacggttggcagccttaatgaagatgaagtgttgaaattatctgcttcctgcgagttgaattcaactcatcctataggcgaaagtatcgttgcagaagccaaacgcagaggacttgatatagtaagaccaaataatgtacatgaactttcaggaatgggaattaaggctgatatcgaagataagtcattaattttgggaaatagaaaacttatggaagcaaacagtattgatatttctaaatataatccctcgggaggaggttcagaagtattattagcgatagacggagttttgcagggatatattttgattgcggatgcaataaagagcgaagcggctccggctataaaaaagataaaatctcagggcgctgtgactgctatattgacgggcgattcagaagaaactgctaaacaggttgccgaatatacaggcgttgataattacagtgcaaaacttttgcctgaaaataaggtcagtgaactaaaaaagataagacatgagtatggaagtgttatgtttgtcggagatggaataaatgacgcaccggttttagccggcgcagatgttggagcggcaatgggaagcggcgcagacgcggccatagaagctgctgacgttgtgtttatgaattcaaatatggatgctgtccctaaatcaatagcaatttcaaagaaagccactgcaattgcaaaacaaaatgtagtgtttgcactagcaattaaaattatagtaatgtttcttggactaacaggtatttattccaatatgtggctggctgtttttgctgatacgggagttgcattcctatgtataataaattcacttagagcattatactcagtaaaataaaaaattgaattatatgatacagtagttaaccgaaaattatttccaaaaaactagttgatttatgtagaaatttatggtaaaataacaacatattttatattaatatttttataatcaaaacttataagggcggaggtaaaaattgtgttaactattgttattcaggtagtcgtttttgcagtatatcttttgtttatgcttctgattggatttggattttataatacaaataatactcttaacgactactttttgggcggaagaggtttaaacaaatgggttgcggcaatgtcagctcaggcatctgatatgagcggctggctgctcttgggattgcccggcacggcatttttggtgtttgggggaacaacagaagcactttggacagctattggattgcttataggtacatatttaaactggctgtttgttgctaaacgccttagaaagcagactgaggtttccaataactctattacaatcccggtgtattttgaaaacaggtttgaagataaaactcatatactcagagttgcttcttcgctttttattatgtttttctttttgatttataccgcttctcagttcactgcaggggctaagctgcttgaagcaacgctgggcgtgccttatgttgtcggtttgattatcggcggcgtaattattaccggatatacgttcacaggcggatttaaagctgtcgcatggacagatttgattcagggaataattatgttttttgcgattatagctattccgattattatcgtttgtcagatgggcggatttgaagggacagcaatagaatttaaaggactggaagccgcaaagaatgaagtgttttcatggcttccgaaaagcgccggcggaacgattaatatactgcttttggtctcaagcttaggctgggggctcggatattttggtcagccgcatattttatccagatttatggctatcagaagccctaaagaagtaagacccgccagaataattgcaatggtatgggtaattttaactttaggtgctgcagttcttattggtgtattaggaaaagtatatgttgaaaatggtatggttgcccaaaactatgttgaaatggtaaacggcgacagtgaaaaaatatttatggttttaatacagaccatattcgggggctctaaaaacatctttatgataatcctcagcggagtattccttacagctattttagccgctataatgagtacggctgactctcagcttttggttactgcatcaacattcggagaggacctttacagactgttttcaaagaagaaacccagcagtgattcattggttagaataagcagatatgccgttgtggttattgcacttattgcaatatttatttctctaaacagaaacagttcagtattcgagttggtatctatggcttggggaggatttggagccgcgttcggaccatgtatcttattctcactctattatagaaagaccacagctcctgctgctatagccggtgtgcttacaggaggtattgttgatattatatggtacttcttaaagggtggtatatttaatgtttatgagttagttccggcgtttataatttcatgtttggtgatatttgttgtgagccagtttactaagtgtccagagagtgtttcaaaacagtatgatgaagctcagacaatagaaattaattaaactgataagccgcagtttgctttttatacagcgctgcggctttataaaaatgatggagttagataattatgaactttgatgaattatataagatagccgctgaaactgtgaatgaaagaaaattgtccgattatacatcggctggttctgttgcggcagctatcttaacggataaaggaaatgtttataaaggcgtttgtattgacgctccgtgctctatggggttttgtgcggaacatgcagcaatagcggctatgattactgccggcgaaagcagaattataaaaatggttgctgtgagcgcatgggatgatataattccgccttgcggccgatgccgtgaatttatatatcaaataaataacgaaaatataaactgtgaagtaatgttgaaagataaaattgttactcttgattatttgcttccaaacagatggtcataagagcggtttttaatggggtaggttggtgtgtttaaatcgttttacagcaatattaaaaataaaaaaaataatattatgaaagatcggctgacagttgttgcggccgtattttgtgttatatttataggtttatgtatattatttttgaactattgtaaaattcagaatgagttagaaagccaaaaatatattaaagaaattgcggaaaacagcaagacaaccgttaataagcagatagaggatgactttcaaaccttagacggcgtcgctaaaatgattggcggacttgaagagattaattatgatactattttgcctgtacttaaaactataaatgatgataatgcttttatacgtatgggatttgttgataaaaatggtataactatgggagtggatattgatggaacccaatataaagatatagatatttcagacaaaggatttgtagagaaagtctatgcaggagaaagagttataactaatactcagaaggctgaaataggcgatttatacgtgaatttctatgctgttcccataattcgcggaggcagggtgataagcgccctttgcgctgttcgtgctgccgaatcgcttcataatatattgaataactcagtttatgcgggaaatggatttgcgcatatagtagatagtcaggggaattatgttataaggtcaaaacgtccaactgtggatcaaaattcacctgatatcataactccttataattatgatgatagttcaaaagaaaagttaaaatcagatttaagaaatggacaagccggaaatattgaatattattacaatggagaaaagcgctgggcagcatacacgcctataggtgttaatgattggtttgtgttttgtgttgttccgtcagcagacatcagcagatactactctaatatgattattggaatagtagggataattttaggatctgctttactgtttttatttctgctgatacgcattagaagaatgggagagcgcagcagaagggaattggaaaagctggcgtttgttgattcgctgacaggttatagaaatgaacaaaagtttatgatagacgccgaagaggctattaggaaaaatagtgaagaaaattatgctattttatatgcggatataaaaaattttaaatatgtgaatggaattttcggttatgatgtcggcgataagctgttaaaatattgggcagacgggattaataaaacaattagagacggagaagtatttgcaagattcaatgttgacaatttggtttccataagaaagtataaagttaaagatgagttaaaaggtttttttgagacagctaaaaaacgtttgtgtacatatccggatattcaaaaatataaatttaaaattgagatgtatatggggatatatttgataaatcaaaatgacaatatatcactaagggacatgcttaacagagcaaatgttgcggtaaaagcgataaaaaattccggtgaaagccgaatggtatattataatgataagatgagggaagaacatttaagagaaattgaaatggaatcccgtatggaaaccgctcttgataacggcgagtttaaaatgtatctacagcccaaaatagattgcaggacatataaagtcgcgggtgctgaggctcttgtaaggtggaaagaccccaataaaggtataatccctccatcggaattcatatctttgtttgaaagaaacggttttattgttagtatagaccgttttatgctggaggaagcatgtcggttttacaaaagatgtttggaaagcggcgatgtgcccgggccaatttcggtaaatgtatcaagaaaagggctgtggcagcccgactttgttgaattttataccgggacgaaagaaagatataatattcctgacggaggtattgaattagagtttacagaaagttttgtgtttgaagattataagctttttattagttctgtatctcagcttcataaagccggattttcgtgttcgctggatgatttcggcgccggacagtcttcgctgaatgttctgaaaaatataccgatagatactttaaagttagatatgttgttttttcgggaaagtaacaatagtctgcgggataaaaagttgtggaaaagtattatagaaatggcaaaggctcttgatatgaaaactgtgtctgagggcgttgaaaatactgaacaggttgaatatttaaaagaaatcggctgtgatttgattcagggatttgtattttcaaaaccattgccggcagaagagtttataagttttataaaaaattggagaaatgacggtgataagcaatgattgagacggagagactaatactgcgtccatggaaagatgaagacgctgaatctttatataaatatgcgagcgatccgaaagttggtcctattgcaggttggccggtgcataccagtattgaggacagtgcgggggttataaagggagttttatcagcccctgaaacttatgcggttgttttaaaagagacaaatgagccggttggatctattggattaatgataggtgaaaaaagcaattttgatattgaggatgatgagggcgagattggatattggataggggttccgtattggggtatgggtcttattccggaagcagtcagggaattgctgcgccgtggatttgaagatttgaatcttaaaacaatatggtgcggatattttgatggaaatgacaaatcgcgcagagttcaggaaaaatgtggttttacttatcatcataccgaaaatgataaggtatgggttttgatgaatgataccagaactgagcatatttcaaggataaccaaagaagaatgggaaaatactaaaaaataggttttaaaattaaacatgaaaaggcaggttatgaaaatgccactaaagacggaaagactagtattgcgtccatggaaagatgaagacgctgaaaacctttatgagtatgcaaaagaccctagagttggtcctgaggccggctggtatgcacataccagtgttgaatatagtctgaatgctattcgaggtgttttatcaaatgatgaaacatatgcaattatcttaaaagatgaggataaaccggttggcggtatagatttgatgataggggataagagttatttggatattggttctgatgagggagaactcggattttggatagcggttccttattggggcagaggattagtaggcgaggctgttgacgctttgcttcgtcacgcttttgaggacttaaaccttaaaactatatggtgcgggtattttgaaggcaataacaagtctaaaaaggttcaggaaaagtgtggatttaaatttcatcatgttgaaaaagataaattttggcctattacaaaagaaataaaaacagaatatgtaaacagaatgacaaaggaagaatggaaaaatagatttaaataacttaagatttaataaagaatttggagccgtcagatattttttaagatattgatttaacgttattgtgttaatcaaagtaacttaaaatatccgacggctccagtctgttaccatctgctgttctattatttatagtctataacttctttagccatgtttacaaagtcttcctggctcataccggtttcaaatcccataatgttgtaagttattccttcctgaacccatgagacgctttgaagttcttgagtttcaatatcatcagaaccataactgaaaactaaactgccgttttcttcgtctatcttatcctgctcagtaagtttataatcaggaggtacgattttatttatatagtttgtatagtaaatatctatattctgatatttgtcggcaagaatagtatgggtgccttcaccaacctcaaagttatccgacttatcaatacttagcgtaattcgtttgtcaccatttttatatttagcgctgaagcttttaaactcttcggtaatatcaccgttttcatccttactcttgttgtcaactatatttccgcctgtaaattcaaatccattgttaaagttttcaataatattagcgctgtatcccagctttttatccagttcttgttcagttggaatagagtaataatcaggtatagatgatgaacttgaatatatcatcgggaccagcttgcctgctgcaaatgcagtggttcctattaacaaaacagcggcagcgcagattgccaatcctcttttaaatgtttttcttctattcataatataaatctcctttttttcaggcagctcatctaatgtaagctgaatttttgaatggaatttgcttgtagattttggaaaggaatttttaattttattattatctatattcattatttttctccttttcatggttaatcaaaacacgacaaatttgattttagagcttttcggccttttgccaatcggctttttacagtgccggcaggaatttttaaaatatccttaatctcatttactgaatatccttctatgtaaaataaaacaactgcaacacgtattttaggtttaagttccattatagcctgatataattctctcacctcagaattgtcgagcgtttgaatatcagctgttatttgttcttcatacgggacaaatttggagtttcgcttttttagcttatagcattcgttgatgagtatgcggaccagccatgttttaaaatactcttcgttctttagagaggatagctttgtatacgcgtttagaattgcgttttgaaccgcatcctcgcagtcggtgtctattataagaatagactttgctatgttatataaggtttgttcagcgtctaaaaccttttgcgtaaatgtgtaattatccatgttatactttctgcctttccaaagcagttcaacagcgctgttgtttttgctttacactaattagatacatttgaaattaaaaaggttcatttttgttaaaaaattttttgattagcatataaagataagaatgtacgcctgtgaattattatattattataaaataaaagcccgtcactttacgtatgacgggcttaagacaacaaaagtcaattataaaattagtctccggtttccgaatcgattgacggcgcggtttggtctttaatagtgttcttttctatatcggctttagtaggtgttttcctttcatctatcggcgtatattcaagacgtttaaccgcacttttgtaggcggggcgaataattttgttgctggtggttacttcttcaattctatgagcgcaccagcctactattcttgccattgcaaatataggtgtaaacagttcttgaggtataccaagcatttgataaacgaaaccggaataaaaatctatatttgcacacataggtttatcaattccctttatttctctaaaagcgatcggtgcaagttcttcaattgcagaataaagagcaaattcatcagagtgaccggtttgttctgctaaatatccggctctttcttttagtattatggctcttgggtctgaaatagtgtaaaccgcatgaccaataccgtatataagtccgtttccgtccccggcttctttgcgcagaatcttttttaagtattcatatatttcatctttatcttcccaattcctaacattggctttaatttcattcatttgggacatcattttgtcatttgctccgccgtgctttggtcctttcagtgaaccgacagcagcggaaatagccgagtatgtatccgttccggttgatgaaagcacatgcacagtgaaagctgagttatttccgcctccgtgctcggcttgcagcattaatgccaaatctagaatctcagcctcaagctcagtgaacttattatctgccctaatgagatgaaggaagttttgagctgttgaatattcaggcacagggttgtgcagaatcagactttgattatcaaaatagtggcgttttgacgcgtatgaattagcaataagcacagggaaacgagcgataagtgaaaaactttgcctgagcagattaggtatagagatttcgtccggattatcatcataagaatagagagccagcacgcttcttgccaatttattcatgatgtttttactcggagccttcagaatcatatcttctgtgaattcaggcggaagaactctgtaacttgatagagaccttttaaactggtcaagcaaagactggcttggcaggaagccaaacataagcagaaaagccacttcttcaaaaccaaatcttttttcagctctgcagtttgcaactatatcttcaacgtcaatacctctgtatctgagtttaccttctattggtgacttagtgccttcgtcaataacataaccatgaacttcgccgattgatgtaagcccggcaagaactccggttccgtccgcatttctaagaccgcgcttaacattgtatttggtataataatgtgaaggaatcatgttccatctggaattttggcttcttataagctcaatatatttatcaatattttcatagtcaaaaccattaatattgttatccataaatctaccgcctttccgttagtgtatttaaaacattatacactaaaacagaaaaaccgtcaataataatatgtgcataaattattcatcatcattttttctgtctttatttatttttagaattgaaccgccggttttctttatattagtaagtgattttccatttgagttattttttgatagttcggtaaatttaggaactatacattctataaacttccctttggctctgccgattagatataaatagcctattattgagaatattacagcgcctaaaaagtttatcatcatatccttcatcgtatcaataaggccaatatcaaggtatccgttaattccataatccgacatggcaatcattccgttttttgcaagcgctccatctatcaatagatgattgccttttaaaattacatcgtcaattcctgaaaccaagattgatttgttgatagaaatatcattcattgttatagaagaaatactgttcactatagcgtccttctgcatatctgttctaaggatttgatcggcaaagaattcaaaaaattcccagagtactccgatagtcatagaaaagcaaaaggcgaccataacaacaaatgcaggagataggtggaactgaacgcggtgactttgattaagtatatctatcaatgagaagcctacgcctgccattaagaatccgttagacatgtgaagcattgagtcccaccagggaaacctttgataaaaaccgtttacttcccctaaaaaatccgctgcaaaaataaaaaggactataattacctcaagggttctgggcaagtcgattttaaatctgtaatcgataaatctaggtatcaaaaataatattagagtgagcacgcaagtgaaaacattttcgtatctttgatattttatttgaaaaattatagaacttataacaataagtatcagaataatatacagaccaagcataaatctatttttcttatattcctgatttccaaatagattgaatttcatgattttaacttccctccgtgtttaagaacaatagtattaatagagcacgtgttatcacgtgctctatcaatatggttattatatatttattcaattttgtcagactatatgaaatttataaagaacatcccataataatgaagtttataccttcaaacagcagtgaaagagcaataaatatacctatagctacaaatgttataagcggatgacaaactaagaatatcccaagaataagcgttagaatccccagtgctaaaacaaaaccccaggagcttccaatatcttttaaggcgaaagcctcaaatattctggctatacctgcaataataacccatgctccgaaaattgacgccataacaacattagcgaaatcaggcttaaacatgagtattaaagccaatatgactgttaatataccaaaagccaatgaccatccgcttttctttataaaactgtcttcaccctggcttacgaaatatgaaacaatcatccatatccccgcaagcaaaattgatgcagcaattatatatgtaaagacatttgctgtaaaaaccggagttataaaacataaaatacctaagattaaataaattatgcccataacaatagacaatactttcatttctaatacctcccttaaattatataatattttgaaaatctattattggtaatattttaacatatcaggaagaaacagtcaataaattttgaatataatagtataaaagtaaggtttttatataaatgttttttaattgtaaaaatatatgttttcagagatttcatcaggagtttttcctgatacaagcatgagggttacaagttcaagacagggatatatattttccgcctttttgtcccatccaattttgaattcttgaggaaggattatttcgtcactgccgcatgttgaaaaccccctttgtatacaatataaaaaaccggaatcatcaatgctggaggctgtaacactggactttaatgaaagtccgcaggttatgatatccaaatcatcgataataacgtttttaatttcatttggagattcagcgtttataatgagactgttatttattcttatcataataatccctcccggaatgattgtcatttaagactattattagcttctgtcaagaataaattcaaaaactgcataatattttaatataaattattataaagataaggtgaaaatatgtgtgaccagaattttgtaaatataactcgaaaaagcggaaagtatgaaatgattcccaaggaaataatgaaacttatgaaaggaaaatcaatgccggaaaactcgatagtcagttatgatgacctgagttatttaagcgttccatattatgatttcagttttaaaatttgtttaggtcatttgattatttcaaaagaacttaaaaacgaggtgttggagatatttttaaaattatatgatttaaaatatccgattgaaagaattgagttaattgactatttttataatggaaaagcggaggatttggatttagaatcaatgaggcataataacacatcagcattctgctgcagaaaggtgagcggcacggaacggatttctaatcattcgttaggacgggcgatagatataaatccaaaaataaatccttatatctctgagacgggaacggtactgcctgagaacggtctaaagttttcagacagaggtttaacttatcctgatatttcagaggttgaggaaaaagctatgatacataaaggagataaagtttatgatatatttaaatcatatggctgggactggggaggtgaaatttggcagggaagatattacgactatcatcattttcaaaaaataaaatataaatcttaaaaaaattttaaattagtccttgacaaaataatttggttattatatacttaataaagttttgtgaacttctatatagtttgcagtaagacaattatttgagagattttttaataaaaatctttattcaaattgtaaattctgtattttgacagcaatggcgctgttgagatataatatatagatttttgatacgataatttgaaattttattatgttctatgacgcacaatggggtgtggctttattagctgcactctttttttgtgcagttagaggaagtttatagttttttgttaaatctaggcgtatgagtataaaatccttatgcaaaatttctgttgatatgaagcagcggattatgatataatgtaacgaaatgtctatattggaaattaaatagactgagatgtgcagatatttatggaggtgtagtaatgtataaaattgttagaaaagaagtgcttaatccatctgtttcactcattgaagtagaggcaccgtacatagccagaaaggcagagccgggtcagttcataattttaagagtggatgagaaaggcgagcgtattcctttcacaatagctgattatgaccgtgacaaggggacggttactgttattttccaaatagtaggaaagagcacggaaagtttgaacgaactcggtgaaggtgacagtcttcaggatatggtagggcctttaggagtcgcttcaaattttgagggtgtaaaaaaagttgctgttatcggcggcggtttaggtaccgccattgcgtatccgcaggcaaaaaagcttcattctatgggcgtttctgtagatatgattaatggattcagaaataaggatttaataataatagaagatctgtgcaaagctgcctgtacaaatttatatacaatgacagacgacggatcaaacgggaatcaaggatttgttacagcaaaacttgaggaacttataaattccggtgaaaaatatgatttagtagttgcaataggtccgctcgttatgatgaaagcggtttgtgacctaactcgcaaatatgatataaagacaatagtgagcatgaacccgattatgatagacggaaccggtatgtgcggaggctgcagaataactgtgggcggagaaactaaatttgcatgtgtagacggacctgactttgatggtcatttggttgacttcgacagcgctattgcacgctcgagaatgtttaaaaatcaggaggcagagtcgagagaacgcgcgcataaatgtagattggagggaatgaacaatgcctaatatgtcacttgaaaaggtgccaatgcccgagcaggaaccaaatgtgagaaataagaattttaaagaagttactttgggatatactgaggaaatggctgtagaagaagctcagagatgtcttaactgtaagcataaaccttgtatgcaggggtgtcctgtaatggttaaaattcctgaatttattgcgcttgttgcagaaggcaagtttgaggaagcatataaaaaaatccaggaaaccagttctcttccggcggtttgcggcagggtttgtccgcaggaaaatcagtgcgaaaagttctgcgtcagaggtattaagggcgagccggtagctataggccgtttagaaagatttgttgcagattggtatatggaaaattgtaaatcagtttctgaaaagcctgagagcaatggaaaaaaggtagctgttgtaggggcaggaccgtcaggcttgacatgtgccggagaccttgcaaagcttggctataaggttactgtatttgaagcttttcacacaccgggcggagtattggtgtatggtattcctgaatttagacttcctaaagatattgttgctgctgaagttaataaattaaaggagttaggcgttgaagttatgactaatatggtcataggcaaggtgctttccgttgaggagcttcttaatgaagaaggttacgacgcagtatttataggaaccggggcagggcttccgagctttatgaaaatagagggtgaatctttaaatggagtatattctgcaaacgagtttttaacaagaataaatttgatgaaggcttataaattccctgagtatgacacgcctgtttatgttggtaagaatgttgttgttgtgggcggcggaaacgttgccatggacgcggcgcgttctgcaaaaagacttggggcagagaatgtttacatagtttacagaagaagcgaagaagagatgcctgcgcgtcttgaagaagttcatcatgcgaaagaagagggaatagagtttaaacttcttaacaatccggttaagataaacggcgacgagaacggctgggttgatagtgtaacttgtataaagatggagcttggagagcctgacaagtccggaaggcgcagacctgtaccggttgaaggcagtgaatttgatttggatgctgatgttgtagtagtagcaatcggtcaaactcctaatccgcttataaagaatactactcctgaccttgagactaaccgatatggatgtattgttgctaaggaagagaccggagagacaagtaaaaccggagtatatgccggcggtgatgttgttacaggagcggctactgtaattttagctatgggagccggaaaaactgctgctgcgtcaattgacgagtatttatcacagcgtaaaaaataattaattatatatattataatgaaaaggagaattatgaacatggcaatttcaaacggttatttaaagaatgtttttgagcaggttcaaaagagaaacgcaaacgaacctgagtttcttcaggcagttgaggaagttttagaatctttggagcctgttgtagaagcgcatcctgagtatgaagctgctggacttattgaaagacttgttgagcctgaaagagtaatttatttcagagtgccttgggtagacgacaatggaaaaactcaggtaaacagaggtttcagagttcagtttaacagcgctataggtccttataagggcggactgagatttcacccgtccgtatatcagggtatcatcaagttcttaggatttgagcaggtatttaaaaactctcttacaggtcttcctatcggcggcggtaagggcggaagcgactttgatcctaagggtaaatctgatggtgaagtaatgagattttgccagagctttatgacagagctttctaagcatatcggagctgacactgatgttcctgctggagatatcggagtaggtgcgcgtgaaatcggatttatgtatggacagtataagagacttagaaatgaattcaccggagtgttgacaggtaagggtcttacttacggcggttcattggctcgtactgaagcaacaggctttggactttgctactttacagaggcaatgttaaaagctaacggtaagtcgtttgacggcaagactgttgttatctcaggttcaggaaatgttgctatttatgctacaaagaaagctactgaactcggcggtaaggtagttgctctgtctgattccaacggatatatatatgataagaacggtattgaccttgattgtgttaaacaaatcaaagaggttgagagaaagagaattaaggagtatttaaatactcatcctgaggctgaatatcatgaaggctgcaagggaatttggactgttccatgtgatattgcacttccatgcgctacacagaatgagcttgatgaagaatcagcaagggctcttgttgctaataactgtttcgcagttgctgaaggcgcaaatatgccgtcaacacctgaagctatagctgtattccaaagcaatggaatactctttggccctgctaaggctgctaatgccggcggtgttgctacatctgctttggaaatgagccagaacagcatgagatattcatggacatttgatgaggttgacgctaaacttaaaggtatcatggaaggtatttttgaaaagtgcgacagcgcttcaaaggaatatggcaaagaaggaaactatgtgatgggcgctaatattgccggattccaaaaagttgctgaagcaatgatggctcatggtatagtttaatataaatataagtttataaatttgatttaaaaaatataatatataatgaaagcggctaaaaagcggcgacctctatagttagacatgaaatctaacagtaggtggtcgtacacaaaaaatcagccgcttttattatatttaatcaaaaatttgtatcagtctcaaaaactagtcaataacattccatttatttttcataatattttaatcttataattttttattaagagaatatacttttaaatcagagtattcacctataagaggagccatttgcctaaaaccgattttacctccgtctaaaacttttccatattcattcccatcatcctgccaggaaaatatattaagctcatctatgaagaactcaattctgcctttatattttataatttttaattcataaaattcttttgcgtcttcgcagttcggaagcgggtctgctccttgacacacaagatgaaatccgttgctcttacgtaaattacatgtgtggaaacagcgctctctgtcccatttgcgcctaaaatatgatatatgatatgtatttatatctccatgtgtatattgcccatattgtccgtctcggggagaaagcgaatagtcgaataaatcttctccgttaattcctttcgcagataaaaacattatgcagagccccggctctttaataggacgaaacttccacgatatttctatatctgacggaaactcttccgggcaccaatatacaaaatttgatttttgtccttcattttcagaaagtctattcttcatacgcattttttgatttacaaaataaacatctgccttgccttccattataaaatctttgacatcttcaggacatgacagaggatttttatatattatctgcttttccataataaactccttttacagtatatttttaatgttttaatttatatatttcttaccttgtgagtaattttctgctttttacagagaatagtgatacggttgttaatactgcgataaaatcacttatcggctccgccagaaacagaccccaaactcccagggcgcctatttttggtaatattagtgctaacggaagcaacaatattagctttctttctatagccaaaaacactgattcttttgcctgccctagagcaaggaaagtctgctgacaagcggtctgcatacccattaatgacattgataacataaagacccgaattgcgtttttacctatttcaattatttgtgcgtccgatgtaaacataccgataaaaaattgtgggaataattccaaaattacaattatcgacattgaaaatacgagacataaaataaacaattttttgaatgctgaaaaaacgcgctcattatttccagcgccgtaattaaaactaattatcggctgaactccttgggcaaatccctgcataggcatccataccaactgcataacactaaacaatattgacattaatgcgacatatgaatcattgccatacttaagcattccgttattaaagactaattgaataaagcagtctgtggactgcataacaaaaggtgaaatccctaatgaaataaccaaaaatacaatttgttttgaaagacgaagatttttaatgcgtatttttatatgcgtcttattccctgtcagaaattttaaaacccatatacaagaaattccctgagatattattgttgcaagcgcagcaccttgcacacccaaatgaaaaacaaaaataaaaatcgggtcaagaattatatttaaaactgcgccgatacaaattgttatcatactggttttagtaaatccctggttagtgataaacgcgttaagccctagagtcagctgtaaaaacattgtcccgatgagataaatagtgatatacgaagacgcatatggcagtgtgttttcactggcgccgaacatgattagaattttatctttagtaatcataaaaaagacggataagattatagaactaataataagcatcatagtacagtttccaagaattttttccgcacgctcattatcattgcatcccattgctatggcggctcttggtgcgcctcctgtgccaagcagcgctgaaaacgctcctataaatattattatcggaaatgttacacccaatcctgcaagagcaagtgagcctatttcatttatgtgtccgacaaaaatacggtctacaatattatataataagtttaccaactgcgccaaaactgtaggaatcgcgagttttagcatcagttttcctatcggtttgcttgcaagaatattttcactttccattataatatttttctcctccttatattttatacttaaatataattatactgctaggctggaaaatttactagtcaaaaaatataaaaattaactcaaaaagtataaagcaaatagcgtatgttttgatataaattttttatgattcatggcaagcagtattaactaaatatattttatttgaggaattaaaaacaggttataaatttattagaaaataataattaatatgcagggacagtcattatatgaagaatttaatttcgtgtatatttaaagcgataacctacaaagataagaattaaaatataagaaaataacatgtattaagctaacaaatatattagaagctcgataatataacaacacctgttataggcgacgaagagctataggtttaaatttgataaccggtaaaataagaagacaattaaagtttaaaaaattaattatttagttataaagaggaaatatagtttttagaaacatcatgtatccaataatgtattgcaacattattggatacatgaaataattgattttttaatatcgttatacatatatagtgttcccaatattatcagtggtgtatttgatttattggaaaatgaaacagctgaacttacagctttggatatatcggtttgatattccgaattgacgttgttctttttaaacaaatctgataattctgcgccgtttaaagctctttgattatttggggtaacggtatagacttgatttatatatggacttataatatttaccatttttttatagtccttatccgccataacccccatgattaaattcactttcatgccggagaaatattcttttatactattaacagttgcagtcattccctgaggattgtgagagccgtcataaattattggcggattgtccgagaatatttcaaatctaccggtccattcagtgaccgctaatccgttatatatagaatttttggaaatattaaagcctgacttgtttaaaattttgattgaatcaatagcgaccgcagcattgccgggttgatacagtccggctaattttatttttaagtttgtgtattcattataattgaaaacagacccttttaaacctgatgagataatttcagcgttttctcttttagtcaataaaagagatgaggaaagtttattagctgcggtttggataacattaagcgcttccgggttatttccgccgaatactgtgggacagcttggttttattattccggctttttcagaagaaatttctgaaatcgtatttcccaggtaatccatatggtcgagggcgacgtcagttattacagaaagaacaggcgtatctgagatattggttgcgtcaagtcttccgcccataccaacctctaaaattacaacgtcacattttttttgataaaaataccaaacagccatagccgtttcaaactcaaagctagtgggcttatcatccatattttcctcaacagtttttatatgagaaacagtttcagaaaaatcggattcagatatattctttttattaattctaaaacactcggtttcggaatcaatacacggagaggtaaacagtcctgttttatatcctgcttctgtcagaacgctttctaacattctgcatacagaacctttgccgtttgttccggctacatgtataatttttaatgatttttggggttcgcccaaaagttttagaatttcaagaatgcgagacagcccggggcggctgcctctgtttgatatactttttaagtaatccagcgattcattataattcatctcatttgcactctttccagctgatttgcgaaggttttgtttttcataagaagataaattatatatccttcaacggtgccaattactatatagagaggaattctcattaatattaacggcattggatagctgaaatagatatataagcctatagactttataatcatagaacctattatatgagcaagacccacagcggcaataagctttaatttagggttgtctttaaacatataaaaataaattgaacctgaaatcaagcctatagaagccgcgccgagcgtaactaatggatttatagcatacccgacgataatacagccgataacatcggcgcatattccgaccgtcataccaaccagcggaccaaacattattcctgccattaaaatggtcaggttttcaaagctgattcgtatcggacccatagtgaatgataattgtttgcccagcacaatgcttaaagcaatgaacaatccggaaataagcaagacttttaaatttccgaataggcggattccgcccagagatttgtaactttcgtttttagaaatttgcataaaaataacagcctcctttcacctcactcatatagcaaggaaagaagactgtgaaaaacagattcaaaactttgctgtatgaagcgggatgcagaacacgaaccgcaagtcaaagacttttcgtttgcctggcaactccccgtccaagcaacacttaacgcacgcattcttactcttcaaataatttcgtacccattatagcatattttagaattttgtcaacagtaattttataattaattttaaattttaaaaatcaataagatttatctgtaataaaggattcaaaaaaatctgtttcaggcaaaggagtgctgtaatgataaccctgaaccgtatcaggaagatatttttcaattatatttaaagactcttcgttttcaacgccttcaacacagattttgattttgagtgagtgacataggtctgacaagtgttttaaaatatcccggtctattttgttctctgaaacctgcataacgaaactttggtctatttttatccagtccgcaggaagagcttttaatatatcaagagacgaatatccggttccaaaatcatccagagcaatttcggcgcccaaacggtggatagcatgtacaaagttttgaatagactttatatctttaatctgatatgtttcggtaatttcaaaggttatatcagagccattaagaccgttcttttttatctcatcagcgataaaaagcggcaaatcataatctcctatctgaggcaccgcaatatttatattaatgtgcatgtcaggcttgcattttttccattctctaagatgtttcaaagctgtggaaattatccactttccgagaggaagaataagacctgtggattctaaaacttttataatattttcaagaccatacttatatgaagccggattttcccatcttaaaagagcctcagcagagcggatcgtatctgttttagggtttattatcggctgaaaaaataagcaaaatgagtcgagattttttactgaacatattaactcgtcataaaagtcaattttttcaatagcctgtttaaaatcattttgtgaaaaaaacagcggaacgtcatacattttgttcttttttgccaaatcagaacagtaatttaatcctttataaatattgcttaattccggcggtgaaaaatctttgactataactgcagcgcaggataaattaatctcaagcttatcatatttgtgctcattttttatttgttcttgaactgtgctttttatgtttttaaataaagttaaaacatcatttttatcagcttcgggataatataacagtatatgatttccttgaccgcggtatagtttaccttttgtagggcataaaagagtaagttcgcgtgcaaaaatagaaaatatcccgtttacaaaactataagaatattttatattcatctttttaatatcggcgattgaaaaatccattattgcgcctgttagcatatctaattctatatattggcacatatcccgtttaaaagcaaaaatatctaaaagaccggtaatattgtcagaaccgtaatcagcaatgagatttttaattacacctgtcattatttccggtctgccatctcctgttcggttcacaaatccgcggctttgtatccaagtgtatagaccgttaagattttttattctaaaatcacatctaagattattactttttccgttatggatattattaatttcatcagtatacatttttatgtcgtcagggtgtattattttcagccaataattttgtgcctgcgatatttttcttacgttggatatatcagttatgtttttaatttgttctgaccaaataatttcatccgcctcaaaatcaacaacgaaaataatgtcatcagtacattgtgacagtgatttaaaaagtaattcataattattttgtgcttttaaattcattgaaatcacctgcggtctaaatataaattatgttgttatgtaaaaatttttataattatttccttttaaaaaattcaggcgttgaaacaattaatgacggtagtgcaaaggtaaaaacacaaacggtgatgttcggcggaaacgaagcagaagcagcattgcggaccagaggttttcttattgttccgtctatagccatactgaaaaaataattatcagattatatttagttttaacataattctccatactattccatttcgtataacttgattcttaatcattttaactatattacaataattaagaatttcaataaaaaataaatatataaaaaataaatatataaaaaataacaaatgaactttactcttatgaaatagaagatgatatcagaataattaaagttttttataattacttgactttgaaaatgtaaactgtcagatcaagaagtcaatttataatagaaatctcaggtgagtaatggtttgcggatagttacatttgttataaaaggcgttcaaatcaaatataagtttgtagcataccatatacttagtttaattttatattatagtttgtattttatctttaacgctcgaatatatatttacaaaatatatttgatattatattttataatttttatgattacttattaaaaacttacaaataataagaaagataaaagttaatcgccaaattacttgattttttttacaaattgtggttaaatataaagatagattattatggtggattatgcctaaaaattatattgatttttaggtaatagataaagtaatcgtatgaattaatttttaggatttatagtgattttaatatagtactattgtatttgaaggagtgttttaatgatatacgaggaaaagacggtatcaacagaagaaatatttgacggtaagattttaaaactcagggttgaacaagttgaaatgccgggcggaaatcttgctgttcgtgaaatagtggaacatccgggcggagttggaatcgttgctgtgacagatgaagatgagattatattggttaaacagtttagaaaacctgtagaaaaggcaatatatgaggtgcctgcagggaagctggataataatgaggaccatagagcatgcggaattcgtgagcttagcgaagagaccggttacagtgctgaaaattttgattatcttggatttatgtatccatccccgggatttgctgacgaggttacacatttgtatcttgctacaggtttgactaagggagaaaatcatcttgaccctgacgaatatctcgatgttgaatttattcctatagacgatgttaaaaaaatgattatggataatgaaattaacgatgcaaaaactgtgtttggagtatttaaagcgcttgaagttttagggaaataatttactctgagagatgaaagaggttgtactatggaagataacacaaagatggaagtaaaaattaataatatggaatataccatcgtcagcaatgagtccgaggagtatgtccagcgcgttgcgctgttggtgaataagaaaatatctgaggttaagtctcagaacagccatttaagcactgcaatgcttgccgttatggccgctatgaatctagctgacgagcttttaaaaagtgaagattcggcaagcaaactgcgtactgaaataggcgagtatatggtggaatccaggtcagaaaaagccgagcttgacgagaaaaaacttgaagtagaaaaccttaaagaagatatgcataagttggaaattgaacttgctaaacgtgaaacagagttagaaaatctgcgttcatctcattcgatgactaggggagccggttctgtaacccaaagcagtgtctcaagacagccgagaagcacatctgttcagcctggaatgagaagcgcaggagcggcagaaaacttagtcaaaagaactgtggaagatgagcggactaaaaaaactggatatccttatggtaacgtaataggacgcggtgatggtataaagaaagactgacgatttacttttgtaattaatattttatctggaggattttatgtctcttactggtaacagtgcttcagcagccagcagtatgaaaaaagaaaaaaatattttacctgaacttttgtctccggccggaagttttgaatctcttgcggcggcagttaacatgggagcggacgcggtatatttgtcgggtaaaaatttcggagccagaagttacgccgataactttgacaatggccagcttgaaaatgctgtaagatattcacatcttcggggagttaaggtacatatcactgtaaatactcttataggtgataaagaatttgctgaacttgaagaatatttaaagtttttaaattccttgcatgttgacgctttaataattcaggatttaggagtattaagtcttgcaaaaaacttaggtctttgtatgcagtttcacgccagcactcagcttactgttcataacttaagcggtgctttggcggctaaggaattaggttttgaccgtgtggttctatccagggaactttcttttaaagagataaaatatatatcggaaaattgcggtatagagacagagatgtttattcacggcgctatgtgtatgtcgtattccgggcagtgccttatgagcagcgctcttgggggcaggagcgggaacaggggacgatgcgcccagccgtgcagacagttatataagtcgggtgagaataaagaaaaatattttttaagtctaaaagatatggctttgattgaacgattggacgatataaaagaatccggagttacttctttaaaaattgaaggaagaatgaaaggtccgacttatgttggatgcgtaacgaagatttataaaaagtgtctggaagaaggcaggcagccatctaaatcagagataaacgatttaaacaggatattttttagaggaggtctgagttccggatattttgataataaaaaaggcagagcaatgtttgcttttaataaaccggacaatccttataaaaaagaaacgagcagtttagaaacaaaaattttagatgaaatcaaggatagggaagataaatttaaaattcatctgacagccaaagtaaatattgctgtaggtgaaaagattaaacttattgtattatataaaaataagacaattacggtgaggtcgaataatactgttgaagcggcatcttcaaatccaactgaaaaggaaagggttattcagcagatttcaaagaccggaggcagcgtcttcatatttgattcaatatcggttgaagtcaccggcagagcgtatgttcaaattaaagatttaaactacatccgccgcgaagcgctgaaaatgattgaagatgaaatattgtctgacagcattgatatacaaaatagaaatgaatctatatctttaaatcattctgctggatgcgacagcagtttgagcggtatgacagcttcaatattttcatatgaacagttcactgctgttaaggagtttgaagaatcgacagggaaaatttttagatttatatatgtgccggttcgcttattagaggaagattataaacggtttatctctgataaagacaggatagttatagagcctccttcaataatacatgattctgagtatgaaaaatatattgattttataatgaggctgtttaacttgggatttaataagatcagagtacacaatatatctgaataccgcagaatttttgatggttttaaaatttttggatcttacagaatgaatattacaaacagtaattcagtaaaattgtgttctgttataatggggtttagctcggttatgctgtcacctgaactcagtatccctcagataagggatatagcaaagggcgtagatataccgacagaagtatgcgtctatggttatcagccgttaatgctgactgagaattgtattcttaaaaatttggacagcaactcttgtaagtgtaatagtattggctgtattactgacagattgggaaaaaagtttccggttataaaagatgggaaaaattgcagaagtgtgctgctgaacagctgccctacatttatggcagacaagatggaagagctgaaatgttataatattaaaatgtataatttaaactttactgtggaatcaccgaatgaaattaaaagaatttgcaaagcctatctttgcggtgaaaattatagaccggaagagtttacaagaatgcacttttataaaggaatattttaggttcacattaaatataataatttagttttaagaggttgaatatgagatttatattagcatccgcttctccgagaagaagagagattttagaaaacatttcacttgattttgaaataattgccgatgaatctgaggaaataatgatcgaaggcgaaaaaccatacgacaccgtaaagcggctggcgatgcaaaaggcaaaaaatatagccgcaggaattgaatccggtgaaaacaccatagttatcggagcggacacagtcgtttcaattgatggaaagatattgggcaaaccaaacgatgaaatagaagctaaggacatgcttttgactctttcgggcagaataaatactgtgtataccggtcttgctgtaattgaaactcagagcgggaaagaggtaagtgattttgtttcaacaggcgtaaaattcagaaacttgagcgaaaaagagatagaaaactatataagatccggtgaaccaatggataaagccggagcatatggtattcaaaaaataggcggattgtttgttgagtctataaacggagattattttaatgttgttggtctgcctctatgcagattaggagaaatactttcagaagagtttggtataaatttgatataaatacctgattttatatagctttcaggagggatatatatggcgattgatttaggcatagattttggaacaagcagtactcaaatttataatgcgaatgaagaaaaaattatagttgacgaacctactgttgcggttaccagaggtgagagccgtgaagtaattgccgtaggaaccgaagctttagatatgcttggaaaaacggccgacagtttgtctgttttaaatcccgttaaagacggaggaataacaaactttgatgttgcggttggcctgcttaaaaagtttctggacaagaatttaaacaatgtattttcaaaaataagggcggcggtaagtgttccgtcaggtattggagacgtggaaaagagagctatagaagaggtcgtaatatcagccggtgcaaaagaggtatatcttattgaatcaccgcttgcaggcgcaataggtgcaggagtcgatataaacgagcctaaggggtatgttatagtagatgtgggcgccggaacgacagaagttgctgttgtatcattgggcggcgtagttgtttccaaatcagtacggtcagcaggtgacgctcttgataatgatattattcaattaataaagaaaaaatataacgttgaaattgcaaagtctacagccgaaaaggcaaaaataaagctgggtgctgcaatggttgggctcactactgatgttgtagagctaaaaggcaaggatatgtatagcggagtgcctaaaggcgttgcgattagtgcgaacgagataaactctgcaatgcgcgatgatataaactttatattggaagctgtgcgctgtgtcctggaagaaactcctcccgaactggcttctgatttaatagaaaccggaatagtgctgacaggcggaagcagtaatatgcgcggtttaggaaagcttataaaaaacgctactggcataaatgtttatcaagctgaagaccctgtgtgctgtgtagcaaaaggggcgggaacagctatggcaggaaaaggcggatttagaaatatgctgacgcaggcgaccagaagaaagaattattaactcaggtggtgcagaatttgaaattttttaataaacataaaatggcgctcatcctatcaggatgtacgcttttggtagtggctttacttatatttttaggtttcaacagcggtaattctactgctgttgaagatgcaataaaaacaaccacgtcccctgttcaaaagttttttggaaatattgggagtggtttatatgatgtgactcattgtttaggtgagttaaaagaactgagaaataagacggatgaactgtcaaaaaagaatactgaacttgaaaaacagaataatgaaaatgctgaaatggcagaagaaaatgacaggcttaagcgaatgctcgaactaagacagaataatcccgatttagatttggccgccgcaaatgtgacagctgatgagccttcaaactggttttccgggtttacaatagataaagggaaaaacagtggattggaagtggagcaaaccgttatatcttccgatggttttttgataggaaagatttctaaggttggtacgaattgggcggatgttgaaacaataattgaccctgggttttctgccggagcaatggtggaacgctctaaagatttgggggttgttgaaggtgacagcgagcttagatataacagacagtttaagctgtcatatttgtcgcgcgacacagatattgaaattgatgattacgtaaccacaacaggcctcggcggagtttttccggcaggattcagattaggaaaagtcgcggaaattaaggacgatacggttacgatgaccagatatgcggttgtaaatgcttgcgttgattttcgtgatatcagacaggtatttgttgtaacaaacaatatggatgttgttgctgatgaagaaaatgctaatatgaaagccgcaagggagagagcggaacaggaacaaaaagaaattgacgacagatcgtctgcaagtccaaatcctgagcctgatgaagaagatgaagattcaggaggttcaagtaaaaataataattcctcaaagtcaaaaaagtcaggtgattttgaagacttggatgaagaaaatgaagattaataagcaggtagggagatatatatgaaactgttacatcatgttgtttggttaatattaattgcaatcctccagcccgcgcttataaatgctttgtctgtgtttggggtaaacggaaatgtttttctattatttattgtcttaataggatttttttgcggaagaatgcaggggatgctctgcggaatattatttgggttggtttatgatatatatgttgggagatttataggaaccgatatgcttatttatttgtttataggctatttttctgctgttgtaagcgacagattttatggtcgtcctaacatttatgttttttctgcaatggcggcaggagccacaatagctgcagaaataatttatctaataccatattctatgttttgcgaaggttcctttgtgtggatttctgctgtgaggattatatttatagaaacagttttgaatgctgttttggttttgcctatgctgtggtttatagaaaagacacttgtttggtttaagataaaaaagtattgataaaattttggtgataatagatgaaaataaacgatattacaaggcggactataattatcggcgccattgtcgctgttttagcgattagctgtataataaagctctttaatctgcaaatagtgaatggcgaagagtataggatacaggctgataaccgcacaatacgaacatacgctacaaaagcgccgcgcggagaaatttttgacaggaatggggttccggttgttgaaaataggtgcggatacagcattcagatatttaaaactgatatttcttcagaggagttaaataaaaatataaacgatatagtaaaactgcttcacgaaaatggagatgagtatacctcaactttcccgatagaatataacgaggaagaggagatccctgaatataactttgaaaaatccgattcagcagtttcctcagctgatggtaacaaaaataaagaatcagatgaagaaaaaaaggatagagaaaagaaaatccaagaggatacggcaaaaaatattgctgagtgggaaagccaaaataaagtcgatacatttaacactttaagagaaatagtaaaatactatgcggaaaaatatgagatttctgatgatttcaatgaaactgaaaagctggatattatggctgtcagatatgaaatggagcaaagaaaattcagcggcagcaatccgtttgttttggcaacagatgtaagcaatatagtcattcagaaaatcaaagagacgtattatccaaccggttttgctgatataatagccgatactatcagaaattatgcaaaaggaaatatggcggctcatattttaggcagaacaggtataatatatgcggaggagtatgaaaagttaaaagacagcggttacggcatgaacgacataattggaaaagacggattggaagctgttttggaaccatatctcaaaggcactgacggttataaaaaggttagaatgacatctgacggcagatatggagacgtggtagatgttaaacctgccaaagccggaaattatgcagagctaacgattgacgccgagcttcaggaggcggcggaaaaatcgttgaaaaaacggataaatgaagcggtcggagataatggggcaggtgcagcgatagctgtggatccaaacacaggagaggtgttggctatagcttcgtatcctgactatgaccctgaaaaatttaatgaagaatatgaggagctggttaataaaaagtctaatccgctttttaaccgcgctttgaatggaacttacgctccgggttctacatttaaaatcttgacgtctgttgccggtttggaaaccggtttaatagaccctgacacttatataaccgacaggggaaagtacacctattattcagattatcagccgacatgtcttgcatattcatctcagggagttacacatggcacaataaatgtttcggaggctataggcgtgtcatgtaactatttcttttacgatatcgggcgaagaatgggcatagaagcgcttgatgaatactgtgataaatttggccttggaaagacgacaggaatcgagctggctgagagcagcggcacggttgcaagccctgaggaaagagaagctgcaggaggagaatggcatcccggtgatgttcttcagacagcgattggccagtctgataatcttttcactccggcacaaatctcaagttatataagcacagtgttaaataaaggaaaacgttatagactgcatttaattaaagaggttgcggattatgataccggtgaagtcataatgcaaaaagagccggaagtaatttcagataatccgataagcgattcaacatttgaagcggtaaaagaaggtatgagacaggttgtcgcagatggaactgccgcaaaagtgtttggtaacagcgagttaaaagtcggaggtaaaaccggaacggctgaggtgtctgacggaaaagataatgtcttgtttacaggttttgctccatacgacgatcctcagatagtggttgccgtggtaatagagcatggcgccagcagttcatttgcggcgcaggttggaaaagacatatttgacgcctatatgaaaataattcaataaaattaataattttatgaaaaaactactttactttttgtgaatgttgtggtatagttttaaatgcagggatttgaaaagatgaaagttatttttttgaatttgtatagataattgccctgtttgtatttttgtaatgattttttatcggtactatatttttgttggtattgcatttttattggttgtggtgaatcaatatttataagacagatgcagtgtgccgtataagatattgcaaattttagtatatgacgcagataaagattgtttagaaatttatataggaggcataggaaatgaacatagcacttattgctcatgataagaagaaggatttaatggttgatttttgtatttcatacagtgctattttaaagaagcataatatttgtgctactgggactaccggtgctgttgttgcggacgctacaggattgccggtaaagtgttttcttccggggattgacggaggagaccagcagattggcgcgcgtattgcgtataatgaaattgacgccgtgctgtttttccgcgacccgttgacgcagcagaaatatgaaccaaatattgattcactgtatcgtttgtgtgatgttcataatgtgccgcttgctacaaatattgctacggctgagcttttaatcatgggaattgagaatggtgatttggattggcgtgaatatgttaattccaaacgtatagtgtaatatcaattttgtacaataaaaatatagctgaaatttaattgagtttatatatttatgttaaagatatagcgttttatatattgccccggtttgtactttttgtgcaagccggggtattttatttttaggagtttttacttatttaaattttgcaaacaaatttagtgattatagaattctacagtatataaaaaccgtttttatctctgcgctttttgcagaatgtacgataaggtcacgctgtgtcacttcctttggtatatcatagaaatgttaattcagacttgttggtatgaattgaatatttaaaaagagtatgatattataatggaaataataaattgagtcaaacccgatgtgatcggtgcggtcgtccatttaaggatctgaacgccaaatacggctggcggtgtgcggaaatcatagcgcctggcggaagcttaatcattgatttatcagcaattttcgctatgcttgaaaaatacgctgacttttcttttgaatcacagaatgacttgtttgatatttctgagatattcgagaagatgctgacactgtcgtcagcgccgtattctatgcaggcagaaaatgattataagggaattattcggggcaagcatcgggtacaagagcaggaaaagtatatgataattatgattttaaattgccaaccatggatagcagaggtaattcgataacctataaagaattcgacgttaacccacccacctctggaattggtagagatgcatcgcgatttgttactggcagtgatgggtcaatatactatactgatagtcattatggtcagagtgtaagtccaacgggattgccaccatttataaaaataaagtagaggaggttttaatgtggaaaatagaatatatcaaattacaaaagatgaactaaattcaattaaacaacagcttaatagtaaaagcaatacatggattgcagagattgatggtgacaacatctcaacatggcaagattatgcagatgaaattgaacgtgtttttaaattccctgccaacattatagaaatgcatgtaaatggactgagtatcgatggatatcttgattggataactgatttaagttggttaaacgcaaacggctatgcactcattatcaacaattttgatatctttatgtcaggagatttgcgaaaaaaagaaatcatcatagaatcttttgaaaaaaatgttttgccgtggtggcaaagccaagtagagcaatatcaagttggaggtaaagcaaaaccattcaatgtttatgtagtggattgaatatgcaatctcaagaagtactgcattgcaggacttcttgcttaagtaatgttaaatctgtttttgcattacctcgacagcaattctcatgcccaagcataacccgttaacaatactatccgctatggagattcagcgcaagtcactttgtgcttttgagaaattctcaaacaaattttttcctctgcatttaagcaagcgagaagttttttctcatcgtcacataacgtgcgtaggattctatcgtattcggtgctgcgagtgaaaggtttgctcgtttaggttaatattgtcgtagtagaacagggtgctttgcattaaaaatatagctgaaatttaattgagtttatatatttatgtaaaagatataacgttttatatattgccccggtttgtaccgtttgtacaagccggggtattttatttttaggagtttttacttatttaaaattttgtaaacggatttagtaattatagaattctacagtatatataatcatttttatctttgcacattttgcaaaatgtgcaaataaggtcacgctgtgtcacttcctttggtatatcatagaaatatcaattcagacttattggtatgaattgaatattttaaaaaaatatgatattataaaggagatgataaattgagtcagaaccgatgtgatcggtgcggtcgtccaatcaaggacccgaacgccaaatacggctggcggtgtgcggaaattatagctgctggcggaagcttaatcattgatttatcagcaattttcgctatgcttgaaaaatacgctgatttttcttttgaatcacagaatgacttgttttatatttctgagatattcgagaagatgctgacactgtcgtcagcgccgtattctatgcaggcagaaaatgattatgttgaaaagggagcagccctcgcttttgcaatgttttcgaactatgatgagttaggagataaagcgagaaaatctgccgtatcgcattttatagaagaaatgcacagagcggaagaaacactgccgccgccgagtttaaggtacactttggcagaacaaatgaacaacaagttaattgattattacgaggaagaaaataacccgaacacaaatgatacagtagaagacttcattgatgaattatttggaaacatacctctgtatcattacataaatgcgatgtttgcaagaacagaagctgagtttgaagacagcttaataaaaggattagaagggtcactcaacgcatttatgagtctgccatacgcaagttcaatgatgggcgacatagcggttgtagaacctcaaatcgcatttgttccggaaccttacgtccctcagcccgaaggcgcagggagtaagattcctaaagtatctgatttgaaaaatagtggtactgttcaatcccacatggatgattatgttaaacatggtaaatacaaaggtgaaccggcaagaccatacattgatactaatggtacaaataccttagttgatgaaataatgcaaggcggtacacctataaaagacgcacatttgcctaatggattacgttgggatgtaccaggcagttttagagatgcaaacggtacataggaattggttgtcgatctaaacagtaatacaattgtgcactttaactttattgcaaactaaaaaggaggatgtataaaatgattagactttgtgctgatacaaataaaccaatggctgatggctatgtgttttataatttaagtgaaaatggaatggatacttatcctgagaagaattctgaaataacgctactgtgcacatacattcaaactggttttgtctcaggtgattctgatgatactaactatgtaaataatatgtgtgctaatcaaatatttggacttgcaccatatcaatcttggaaagccataaaattgaatatacctaaagttactcataaatgtgcattacgtctattagatgtatttgattggggaactaagaggcttgataatagggacgatgaatgggaaatgttctttgactctagctctggttggttttgcgttggagatcctgattttaaaggaactattaatgttaatttcattgaaaatgctattgcaacattaaacagtcagggtgaaattaaagctttatggattaaacctgtattcagggatgatatatctttaacaatttagtttatttaaccacaacacaacgtacaaatatataggtgttgtgttgtcctcatggttaaaactgtttaccaattatatcaactgcaatccacatatccaagcagaatctgtaaacaaaaccatcagcaatggatatacagtgcaagtcaccttgtgcttttgagaaatttacaaacaactctttttttctgaattcaagcatttcagtaacttttcttcattggcgcacacaagacgaaggttttattgtactccgagtttcttgtaaagatttgctcgtttgggttaatgttgtcgtagcagaactcatgtaagatgctttgcattatctttttgcttgtttttcaagacaatacaataccctaaattcagtaatgtagctattcacagaactcaacaaaatcgagcggtgaaaatatattataataaagattaaaaacgtaaaatatggctgatgattgggttgctaacgggaaggttttaagacaaagcagcggaaatcatatttacattaccagagaaggcgctgttgtgcttaataatgccggcgaacttgtaactacatatccaaaagctgactttgatgcaaatatggtaaacactgtcgagcaattatttggagaataggaggaaaatataatggtagaagaaataaatgttataattgatgaatgggatccgataggtctatttccttttgccccaaaagatgagtatttagacgaaagtcaagaaatttgtaacgagtataaaaatggaatgggtacaaaagaattagctcatgttatttatcaggtatttttgaatagctttgggttaaatacttttacaaaaccaataagtgaatgtgaagaagttgcagaaaaaatcgtaaagagcatttagaaaagcaaagtcatacattcgtccattatggacgggtgtatgactgtcgaaaaactgttttttgccttacacatttgtgggttcttcgacggtttgaacactccgtttcacggaacgtttgatgtaaattcgggcacaagtgctccatggtttgatcaaccgggtggtggaacacaatatcaattgcctatgtcaattcgagaattacgtagatatggttatatcaaaataattaaaaaatagagttatgaggaaataaaagtatgagtgaaatatttgatacaaaaacattggaaaaccatgttttatctttatatacaagagcagtaccagtgatgaatgaagatggtatatcaatgcctctaaacactttttttcgcaaaaatacacttaatgatattcaaggtgaattttgttttgcggatgaagatggatatcattatagagttttagaaagagacattctatataatgatgacatcacaaaaagtttgtctaaaataacttattgggctatcaagggggcaatttctgatgcggccgctatttatgaagcaaaaaatcggattttaggtcaagattttcggcgtataatgttttctaaagagttacagtatttaaatgctataggtaaggaatatgcagaaatggctgaattagagtatgataatattttgaaagtaaatccattccgggattgaaggaacaaatagtgtaattattttaggatgacaaacacataatcacgaggctgtatttggagatgtacttgatgttcggttacctgatggaactggagtacgatggtctgctgatggtaaaacatttataggtttcttggaaaagtatacaaaataaaaactaaaggattgaatagaaatgaaagaaaaaggtgtttggagtgctgattttggaaacgatccatacgatgattacaacttaatcgtagagatactctacaatgaaaaagatgtggcaatcattcggaaaattgatggccagttaattctccaatggtatgcgaaagactctaacttggaagttcctgtggattggtttttgggtttactggaggaagctaaagtgagattaagctatgaataagtaataagacgcaagacaaacaacctcattttatataggggtgtctgttgcgttatttttaaaataaaggtgaaataaatgaattcttttaaaaaacttattgaactttgtcaagcgttttcacaagggaagattacaatccaagatttccaaagcagaattgaaacattaccttatcctgatgtttgttcaaaacaatattataatattttacataacgctgtcaatcgtttagaagagataatattttgtaattctaaatccgagtatattcaattagggtcagaagtagcccaaggtcttattaaagaaacaaatatagaagaacagaggattagaactacaaaatttaataatcagtaaataaatatttgatttgatactcattaattcaaagatatcaaatacttgacaatttggttgataataaactaaataagatgataaaaatagataataatagaggaaataatgatgccggtaattaatgattatgaaaaaaaacttatattaaaaaatactgaatttctatttaaaaaaggttttattataattgatgaagacagttattgtttaatatattctaatggaaaagtcaaattttccattttttatgaacgttatgaagaagcaagtgatatatcagtaaagtttataaaggaaaacgagtcctttagtgttggatggatttcacgaataatggataaaaataaacaagttaattataaacaaaaaatggagaatattttttatttacttaaattcattgaacaaaattataatagtgtaactaatattcatgtgtgtaaaagagtaatgagtgaggtagagaagctttttagggacgataaattttaaacataattgattctatataggatgatatatttttataaaaatagcaacaaatttgttttcaatagaaactttatttaaatacaattacgcgatgctcattgacacttgagaacagctcatatcattctttactgtaaaactcccaataaaaccactttataaataaaaagcgccaaatgatcatggtataggatttttgaagttggaacatatgaagtaaaagagatgaaaggaactataataatgataaaccaaaatgactggagattaactaatcaaatgaactatttgtttgaaaaacaaaaatatgtatatttccagaaacattcagaatcatggaatcatgagcattgtgaattttgcaatgaaacaatttgcgatgataaaaaaatggagtgctgtacaatagacaattatcattggatttgtgaaaattgttttaatgattttaaagatatgtttaagtggacagtagtttgatttataaatataaagaaaacataactatcaactttaagtattgtgttgtacatttgggcgaatttgtttactcattatatctcagtatgaggttgtgtggaggagtctgtaacgtcaaataaatagaatgtgtatgggatattacaccttacaagaatcataacaccgcaacaaagaatccaggattaaaaggcgagccaaactcaagtgtagatattttagatgatgctggaaatattaaaacacgcagatggtttggagagaacggtgaccaaataagagatgtaaatatgaccaaccacggcaatccgaaaactcactctgaatggccgcatgaacatgtatcaagataatatagaaagagagtatgtatatgaaaaaaattagttttaaagattttgagtgtatcatgtcatacgatgttgctaaaaaacaagacccttgcattgaaatagagttttgtgttgatggatgttttgagtatcaatcatcatggctaggaaaaatgattgatgaggaaactaacaaatctatatattggtttggattagtggaagacggttcacaagcttatgattttgattcatttgagcaacttgtaaatgccaatattttttatggtaaaagtatcaaggacatatggaatttagtaacattgctttccatagacgcttgtgatgtgcaagaacgactgccattttatttagggtaatgcctaaagaatcgcagcactcagattttttgagtgttgtaatttgttttactaaaactgtttttgtatgactgtaacaatagttttcttaccaaagcaaaatccatccaaaaatccattaataagattttacatgattcatgtgctcttggcggtggatttttaagagatgaatgggaatttcttgagtcaacgttaaatcttacagactcaaatttattctttgaaggaggtttttggtatgttaaataattacttaacagactgggaagcagtagaaaatattgatttaataaagaaaacagctttacaagtctggggagaaaatattgaatttggtgaaataaaaggcagcaactcaccttatcctgagtttgagtggcagatatatctttatagtaaatttatcattaaactggattatgaccgttcaacactaagcataggtgttccaactaaagaaggatatgtagtattaagcagccttacaaatgaatcagtttttgggggatttgatggcatgaaaccggagaacttgctgcataattttcaagtgcttgatcgtcttattcagacgcagaaaattgattaaagttgaacaatgcaatacaaccgccggaaattgggcggttgtattgatgcttttggttaaaactgtttccatattatatcaattgcaatcagcttgtggtacacaatataaattacctatgtctgttgactgattggaagttccacaataaattcagtaaatttatttggttcgctttttagttttatagttcccttatgtgaaacaacaatagactttgcaatagatagccccaggccgtagcctccgctttttctgtctctagatttgtccgaacgataaaacctgtcaaaaatctttgatatatcttccggcggaattccattcccggtgtttttaattataaatctggctgttttattatcaagtttttttaacgtcacttctatcgttccgccttgattagtatatttaatcgcgttatccaagagaataagcactagttgttttatttgactttcatcgcctgatatatatatttcatcgtccaaatcctcaactaaatttaaacttttctcatatataacagcttcggttgtaaggatgacattttcagcagcagaggaaaatgaaaaatttgattttattatattattttcggaactgtggtcaacttttgctaaataaagcaggtcgttggttagttttgccattcttgaggattcgtctttaatataattcagccactttttttcttcattaatagtgctgtctccatgcgtcatgagaagatcaatgttagtattaattgtggttagtggagttttaagctcatgtgacgcgtcggcaataaattgattttgtttgttccaggcgtcttctattggttttattgatctgtttgcaaaaaataagcatattaagaatactaaaattaaagcagccaaaaggacaatagataaagtaataataagtttttgcagcattccgatttgagtattaatatttgagatgctaagataataaacggctgtttcatttccgcttgtatctgtttcatatgatgatatgattaggtatttccaataggaatcatcatattttataatatgagaagtttttgtgttgttattagaactattacttttaattcttttgattgcgttgtcttttattgttgtatagaattcatcatcatattcatacggtgaccgcgtctgcattatattgccgtctaagtccagtttaagcgagctcggctcatccggcgcaggaccttcgttattgggaatatgaggaaaaatttcttttctgttcatgtttgggtctgattgaaatggattaaaaaatctttggcctttgggctgaatattagaaatacctctgtccaattgtatgtttacggcagtgttgatgttgttgtaagtcatcataaaaacaacgcagaacgcgctgacaagtaatatggaaatcataatcatattaagcgttaaaaatttatttctaagttttttaaacataatattattcctctttcaatgagtacccaacgcctctaactgtaactattgaagtttttgaccctaaatattttaacttttttctaagaaatgatatataaacttctacgtgattggcttcagcctcagagtcaaatccccaaagtttttcaattatcatatcttttgaaaggacggttgatttgtttgttattaaatattctaataattctgactctttaagggttaagtttatttctttggaagcgcagcttaaagttaaagctgatgtgtcaagctcaatatcaccaaaagtcaaccctgtgggagttgtaacttcgccctttcttcttcccaaggctcgtattctagccagtaattcatcggtgttaaagggttttgcaagatagtcgtcggcgccgctgtccagccctttaactttgtccataacttcaccttttgcggtcagcataatcaccggtgtatcatttccggtctccctcatattctttattatactcagtccatccattttgggcagcattagatctaaaacgacaacatcatatatattgctcattgcatagtcaagtccgtcttcaccgtcatacacactatcaacagtatagttctgcttttttaaaagctgaacaagggcttcggctaaatgtatttcgtcttctacaacaagtattctcatgatattttagtcccttcgttttggaatttaataaataaattcacaattatatttttataataacataacgtacgtctgttatcaataaaagaataatagcagaacagtcttaaattaatcttaaaatattatatattattgaaagaagtttttaatatttcaattttgaaaaagttttaaaaaataattgattttttaaggttgatttaaggtaataagattattataatcacatcaaatttaaacaggttgatgtgattggaggtggatacatggcaattgaagtctttaacagatttgaaaaaaagttttttatgaattcaaaaacatatttcagagtctctgaagaactcaaaaaatatatggagttagatccatacagcgaggttggaaagggatacacaatcagcaatatatattatgatacaagtgatgacttgcttgtaagaaggtctctaagtaagccagtttataaagagaaactgaggctgagaggttatggagttcccgaggaaaacggcaaggtttatttagagataaagaaaaaatttaacggtcttgttaataaaagacgaactacattatatcttaatgaagcatatgattttataaaaaccggaaaagttcctgattataaggaatatatgaatttacaagttcttaaagagatagaatattttttgaaatgttacaaactggttcctgccgcatatgtagcatatgacagggttgcctattttgaaaaagataatcctgatttaaggatatctcttgatacaaatttaagaaccaggcgctatgaccttgagctggagttaggcgattatggagaacctctgcttgacagcgctgatttatggctgatggaagttaagacaagcaaaactatgcctgtttggcttactgatatattgtcaaattataatataataccttgcagtttttcaaaatatggatatggttttaaaaagtcagtcggcgcttatactcctatgcttaagcgtatcaccgcaaaagcaggaagctatgttgaagcaaaagaaaaatacagtgccgtcagggaatcgggaaatattataactgcagattttgaacaaaatttttctaagggttacaaaactgcaaacgcctgatataaatttttgaaaggaaataatctatggaagctttaacaaatctttttaatcaaacagttattgacggaacatcaataacatttatttcagcttgtgctaccttgttttccgccattatatttggtctcattatatcggttacatatatgattactacaaacgaggtagttccaaacagaaactttgtaatgtcgctggttcttataccggcagttatggggttagtaattttgcttgtgggaaacaatttggtaagagtgtttagtttagccggaactgtgtcgctcataagatatagaagcgtaccgggagacccgaaagatattgcgtatatacttttatgcgcggcggcagggcttgcggctggaataggattctatttatatggtgcacttggagtggttttactatgtgtacttatgattctgctgaataaatttaactttgcaagtagttttgagacacagaaaatattaaaggtaactattcctgaggatttagattatcagggtttgcttgatgatttgttcaaagaatatacgaccgccagtgttatgagcagagtcaggacaactgatttaggttcgctgtatgaagttatgtatagtattaaaatgaagaaagacgttaatgagaaagactttattgatgctgttagatgcagaaacggtaatctgacagttaccctggcgcttgctccgacggagtacggagcttgatattgttaattgctttaatgcaattaaagtttttcatataatccattcattgcgaaagagccgaaacatattgtttcggctctttcgcttggttccgtattatccaattttttgctggacaaagccgcattattctgttatactgtcttttccgggaggttgtcccgagataaattaatcaaaggagaaaatatggaacaaaatcaggcgctagataaaaatatatcttttaaaatgcttattaaattttcattgcctactataatttcaatgatatttatgagtatatattcttctgttgatggtgtttttgtttccagattagtcggaaccaacgcactttcttcagtaaacatcgttatgccgatagttttgatgattatggctatcggaacaatgtttggttcaggcggaaatgcgctgatagctaaaaaacttggagagggaaagaatagagaagctaaagaaaatttctcattgttgatagttgtagcgtttataataagttcattgattgcggtgatatgctatatatttttgaatcctttgcttcattttctaggcgcagatgattctataattgaatattgcagagattatgctatacctattttggtacttaccccagtttctatattcggtatgatatttcatatgtcatttattacagccggaaaagctcactttggattgattttttcagttataggcggtatagttaatatcattctagactatttgtttatagcagttttgggaatggggataagaggagcggctcttgcaacaggtattggttattctgttccgtcggtcgtagggtttatatactttttattcaagcgaaacggctcaatatatattataaaacctaagtttgatattcaggttattttaaaaagctgttcaaacggagcttctgagatggttaccagtctatcgaatgcggtggtgacaattctgctcaataatatattgatgcgtttggctggttccgacggagttgcgtccataacgataatactttatacccagggtcttcttgcttctgcatatatgggttattcttttggtatatcgcctataataagctataattatggaaaacaggacagtgagcgtttaaagaagatatataaaattagcttaagaacaattttagttgcttcaattgtaacattttcggccagtttgttatttgccggccctcttgtgaatatatttacacatagcggaacaaacgtttatgatatggctgtgagaggtttcagaattttttcaatctgcttcctgcttatgggatttaacggtttcgcttcagcaatgtttactgctcttaataatggaattgtttctgcgattctttcatttttcaggacgctggtgtttattgtaatttcagctttgcttcttcctgctgtgataggaatagacggtgtttggctgtcaataccggttgcagaggttttaggagttctaatgactatatattatttcaaaaaaatgaaatctgtttataattatgcataggaggctttaaaatgaatagtaataaaaacggtaagattataatcacaatttgcagagagtatggcagcggaggcagacagattggtgaagaggtagctaaaagactggatataccatattataatagaaatcttatagacatggttgcaaaagagagcggttttgccagcggttatatagacaaatttgaagaacatgtctccagtcctcttatttggggaatacctatgcccagagctaatatggcgtttgccggtctcgcagtgcaaaattactattcaaatgaggagaaaatgttcgaagctcagagtaaaatcattagggatattgcgaaaaaaggttcatgtgttattgttggaagatgcgcggattatcttttgaaggatgaccccggatgttatagagtgtttatccatgctgacaaggattttcgtatcaaacgagcaaaggaagaatacggtttttctaaagattctgaggcaaagcatgccgttaagacgatagatagaaacagaaacgcatatcataaaaaatatgcaggctatgcgtgggacgattgccataattatcatctgactgtgaacagcggtttgcttggtatcgaacgctctgttgatttaatatcagaaatggtgttttccagatagaaattttaatgtgttttatatttgcaaaaaagtgaaaaaccaacaaaactgtcataaaaaatagttgaaaatttattgaagttgtgttaaactaatttataggaaaaaacaaacaatttgcaagggggaaatattaatggattcaacagagcttaaagatttgaaaattcatgcggctcacgtcagaaagatggctttagaagccgtacacagcgctggcgccggtcacccgggaggttcgctttcggttgctgatattcttacatatttatattttaaggaaatgaatgtaaatcccaaagacgcaaaaaatcctgagcgggatagatttgtcttgtcaaaaggtcattgttctccggctttgtatggtattcttgctgaggccggttttatcccgaaagaggacataaaaggatttagaaatataaatagttatctccaaggtcatcctgatatgaaaaatgttaatggcgtggacatgtcaaccggttctttgggtcagggtatcagctgtgcctgcggtatggctcttgccggaaagctggacaacaagtcatatcgcgtctatgcggctatgggcgacggcgagatagaagaaggtgaagtttgggaagccgctatgtttgccgctcattacaagcttgataaccttacggcattcttagattataacggtttgcagattgacggcgatataactaaggttatgaattctttgcctattgataaaaagtttgaagcttttaattggcacgttatccatatagacgctcatgattttgaacaaatccaagcggcggtagaagaagctaagcagacaaaaggaatgccaactcttgtattggcaaaatctgttaagggcaaaggagtttcatttatggaaggtcaggccgcatggcatggcgcagctccaaatgacgaacagtatgctcaggctatttcggagcttgacgcttatatcgagaatcttggaggtgacaaataatgaaatataatattggtgataaaatagctacgagacaagcgtatggagacgctttggttgaatacggcgccgacccgagaatagttgttatggacgctgacttatcaaaatccacaaaaactgacgggtttaaaaagacttatcctgaaaggtttattaatactggaattgctgaaggaaatatgatggctactgctgccggtatttctacttgcggcaaaatagtatttgcaagttcttttgctatgtttgctgccggacgtgcttttgagcagataagaaactctattggatatccgcacttaaacgttaaaattggcgccacacatgcaggaatttctgttggagaggacggcgcttcacatcaatgtcttgaagatattggcttgatgcgtactattccgggtatggttattttaaatccggctgacgcggttgagtcaaatttagcagttaaagccgctattgactatgatggtcctgtttatttgagatttggaagacttgctgtgcctacaatatttgatgacagctataaatttgaaataggtaagggagtagagttatccggcggaaccgatgtaaccttgataggaacaggacttttggttccggcatgttctgaggctaaagaaatgctggccggagaaggaataagtgctagggttatcaatatggctacaattaaacctatagataaggatattattataaaggctgctacggagaccggggctattgttacagctgaggagcataacgtaatcggcggattaggcagtgctgtggctgaggtgttggttgagaacgcgccggttccgatgcaaagggttggaactcaggatgtattcggccgttcaggaaagccgtatccgcttcttgaaatgtatggacttgatgcgaagactattgctgaaaaggctaaggctgctattgctatgaagacaaaataatttaaaaagtctttataaatatgataacagaataagctaaaatttaaataaagaaataacctcctatgatagaaaatatcacgggaggttttgttttattataaagtttatttcaaagccggtattattgatgttttatatttatataattttaaactggaacaaatgatttttatttataaataactgtttaaaaggtgataattaaattttatattaataaatttcacagatgttgatttatataaaatgtcatatattcaacttataaagtctgcaataaattggacagacatgttaaggtcatatatcataacaaaaaatattaaaattaattaaatgtggttttgcaagcattggagggctgtgatcacactttttaagaaaagtgtgtgttatacatacatactcatttctttatagcctacaatgtctgtgcccctacctttacaggtggaattacatctaccgatgttcactccaaacaccgcatttgggataatagttttaaaattgtgtttaacaagcttcggcaagtgtgatactttataggtggggtcacattaaaccacaactaagtattttattatattacaactaagttaattattggcatcaatagtttgcataatacaacattgcttatataacatacacttttaaacaaaagtgtagccgcaattgactttgtagattaggcaaaacaagtcactttgtatcacacccaacctgaaggttgggtcacgatacatcacatttaagtcactaattgacataaacggtttttaaaaatttcatcaaaaacaaaacgggatatttggttcaaaaaattggtttgaataactgctgtttttaaagtgtgcaaaatcttatacggagccggatactgtgttttattttaacgtcagaatgcgtctttcaaatatgaattttataataaagtttatattaaaataatataaatatttgctgatgtaaaatatataaaaaaggtataaaaattagtgcaaatttatttatttgctctccaaaagtgttaaaatattgattatcatttaaaaagtataattaataagtttgctgaacatgttaatctgcgtttattgtttaaaaatttctgtaatttagaaattatctgaaacagttcacatgtacgtataatcattatattgataaaatattgaatatattgtcgattggaggagaatgcattgaatttgataaaagtaaatataggaaaaatgttatattcaaagcgtatggagctgaatctgagccaggaacaaatggctgaaaaatgctgtatatccgtcagacaatatatagacttagaaaactccaaaagaatacctatgcttgaaacttttataaatataactattgcatgtgatatggatataggggtgtttattcataatttaattgagtccggttatgaaattacagatgataaaaatgcgaggcaagagaaaaaatgagagaaaactatagatattcatatttaaaagaaagatactatcatgaggatataggaagctattattcttatgcgataaaaataaataattatgttaagcaaagtattagtattctgccggatatatctccggatgaggagatagtaaaaaagattgtaagaatatgcaatgagattcagttggaacctgaatacatagatgaagtttttgagcagtttgtttaattgatatttaaaaatagttgaacagtaaaaaacagagctgatgaaatcataaagaattaaaagcagtttgattattaaaaattaagagtagtttatatattaagaattacaatatgtttttaattgttatcattttgataaacagcgttatttaaatactgatgaaaactaaccgatttataaccggatgtcaaaaatgaatatattgaaaaggcaagcacgctcaaaagaagaatgtgcttgcctttttgattaaattgtgtgaaataaatttagcgtctagagatttatgattattcttgtcaaagtattattttatatagtttgatttcttaacccaaatatatttgagcctgataattccattgtaaaataccggacaccactatttgctgtattgtaaacttaggctttatgttgtacttttcgttggctgtttgtataagtttgtctaaaatgatttttctgttttcttcagtacaataagaacacaaatatttaccgccgggcagaatttttaatccttctatatccgcatggcgtatacatacagcgaataatcttgatattccgttctccgtatagataccagccaaatcttcaaacgcaaactgttcttttagcgacggctcaattttatcataaaaatggctgagatagttccaaagattatctagtgttggcgtctccatagtatctgaaagcataattacacgttcgggaaaattatatacaaaattattttgaatattttgccgtcctttcagttttctttcgtagtccgctttagctaattgaatttttgatttgctgtattgaagcgccgctattttttcatcggcattcttttctgcttctgtcagaaatttaataattttttcaaggtcgttatattccagaacagttttaattttctgtaaaggcaaatccatcatctgcaatgctcgaactgcgttcaaacgtataatatcctgctgtgtataatagcggtattttgtctgctcatcatatttgctcggtttcactaaatcaatccggtcataatggcggagagtctcgcttgtcatattaaccattttggcgacttctccgattaaaaaatattttttcatttttttcacactttctcttgacttatgtgtaacacaaaggtttataatttattatagcaaataaaatcataaaaatcaaaaattattttgataagaacgagggggtaaaaaagcaatgaagtctgcaattatttttttataacgttattggaataaaagaaattgttgtttaaaaatacaagtttaatgaaagaagtgaattatatgaaaaaagttatagtaattataatgtgtttaacatttggagcaattcttttaatgggatgttctgagagcggcgaggataattttgagaaaaaatactatacttcaaatggagaagagatagcaggattaaatattgacgttcgggatagagaaataaaaataacgttttcaaatgataaccaagtacatattgactattttgaaagtgacaaggaatattacagtatttttgtttccgatgataaggttcttcatatgaatgcagaagacggtaaagagtggccggattatattggaggaaaaacgacagccggcaataggaaaatatatgtgcagctgcccgccgcgcttttaaaaacgttgtttttgtcaacgtcaaacggtgatataacgctgccgagtttaaatgtaacggattctatatccatttctgcaaacggaggaaatacaacatttgataagcttaatgcgggaaagagtataataataaaatcaaaaaacggagatataaacggttcggttaaaggaagttatgatgaatattctgttgagagcaatataaaaaaaggggaaagcaatctgccgccggacaaaaagggcggtgacaaaattttaagtgtgtcaaataacaatggtaatactaatattgattttgtcagcgattaaattatttattttaaaaccattatcccaaatgcggtgtttttaagtgaacatcggaagggtgtgacccccacccaaaggtgggtatgatacaaatcggcgtgtctatataaaccaatgtttctgagtgaacatcggtagggtgtgcaaagcacaccgcgttaggtgagccgccatctcacgcgaagcgtgaatatacatataataatttgttataaaataaaaattgccgggactgcgcgcctaacgcggcagatttcatcttcattgagtattcataataatgacactgtaggctatagcaaaataaaatcatatgtataacacacactttttaagaaaagtgtggtcacagccctaccgaagcttgctaaatacaattttagaactattatcccaaatgcggtgttttggagtgaacatcggaagggtgtgcttgcacaccgcgttaggtgagctgccatctcacgcgaagcgtgaatatacatatggcaacttgtcataataccttactatataactataatgagttatataacatcaggctcctcgctctctagagcttcaggttcaatttctatcagttcagatgtacaatgaggacactttgtcgcatttatgtctatttctgtgcagcagtatgggcaaactttggttgtaacaggctcgtctgcaggtttcttttttccgaaacttatcacactgttaactattttaacaaatatgaaaataactacggccataattaaaaagtttattatagcagtaataaatgaaccatatttgaggttaactcctccgatagacaaaaccatgcttgaaaaatcaagacctccgaataagccgagtatcggtgaaattatgtcatttgtcagtgaatcaacgatggtcttaaacgctccgccgattataacgccgactgccaagtcgagcacgtttccgcgcattatgaattctttgaactcgcctataatttttttcataattcaacctcctttttaattaaaacaaattatactacaaatttttacaaatttcaataagaaatttccttgatattgttagaattatatgataaaatatttttacaactgagttaagaagtaacccgccgcaaatgcggcgtgttcgcttaatattttaatggacagctttttttgccaatgaaaacgttgaatggcggcgcagtgcgccttattgaaaagtggtaattataatgaatatacaatttttaatcggaccggttattgggcttattatcggatatgttactaacaatattgcgataaaaatgctgtttaggccgctgaagcctgtatatatcggcaagcggcgcgttccgtttacgcccggtttgataccgaaagaaaaagagcggatagcgaaaactatcggaggagttgtcagcactgagcttttggacaacgataccataaacaagacgcttttgtcggacggtataatatcaggtataaccgggctggtggaaaaactgtttaataaaatgaaactgagtgagaaaactgtccgtgaggagctttatcagaaacttgataaagatttggttgataatatgaccgaaaaggcggaggaagatatagccgctctcatacacgccaaactttcaaaatttaatttcggaactgagatatccaaaaaagttatagttaatatcagaaatcaatatatagaaaagggcaggataaaagccgcatttgccaaattggtggatgacaatatgattaacagcctggcggaacctattggaaagaccattgacaaaatggtttctgaaaattcggaggcaatagtaggcgacttaataaaaaatgagaccggcaggattatggacacaaagaccagtgaaattgctgaaagatattggcattcaatacccaaaataaagtccgcggttcagtctgtatatatcagaacagtaaaaaatgatttgcctaaggttatggaaaaacttaatattgcgaaaattgttgaagataaaataaacggatacaatattaaagagtttgaagatttgttgttttccataatgaaaaaggaattaaacgctataatttggctcggagctttgcttggatttgtcatgggatttctaaacgcgtttatatccataatattcagctgattatacaaacggaggatttttaaatgaaaagaaaaatttttcagaaaacagctcttttattatctgtagttttaattatatgttctttatgttttgctctgagttcctgtactctgactcagtctaacctgtcagacagcacgagtaaaagcatagatattcgtgaggacggaaattacagttcaaaagaagaggtcgcgggatacatacataagtatggaaagctgccgggaaactttataacaaaatccgaagccaaaagtttgggctgggacagcaaaaaagggaatttatgggaggttgctccgggcaaaagtataggcggcgacagatattcaaactatgaggagactttgccggttaaaaagggagtaaaatactttgagtgcgatataaattacagcggcggacatagaggagcggagagaatcgtgtattccagcgatgggcatgtgtattatacaaacgaccattatgaaacgttctctgaagtttagcaaagttttatattgagcataatatataggagataagacaaatgaaagaaatagtaatcgactgcggaccaatgcagaataaaaaaactatgcacaagtgtttggcagagagcctgaacgcgcctgattattatggaaataattttgacgccttgagcgatgttttatctgatatcggcggcagtgaaagagttatgattgtttttaaaaatatgtcggattttttaaatgataataaaaaactatgcgcaaaattaattcgtgttttagcagaagcggaagaagaaaatgaatatttgtccgtatggtttgatgttaaatagtctgtaatatattgtgttatattgacaacatctgccgtcaggtataaaattaataataatacttaataaaaatttaaaactacaaaagaagggcagtgaatgacatgaaaaagattatggcagtatgcttaagtttaattttatgtttctctgtgattccggtttcaatttttgcggctgaaacatcaggggttttcagctcaggcgttagctgggaatatgactccggcagtcagactttgtcaatttcgggaaacggtgatattaatgattttaaagatttggtttcaataccatggaagtcatattctaaagagattaagaatatcaatatatcagaaggtgttaccgggattggcgattatgctttaagctggtgtgaaaacgtgacttcaattgttcttccgagtacggttgccagaataggtgttgacgcattcggctggtgttctaatctaaagagtataaccttgtctgataatcttaagacaattgattctgaggcttttgcctggtgtaaatctttggaaacaattgagattccggcaatggttaacgatatagacagtaaagcttttctttggtgctattcattagaatctataactgttaattcttcaaataataaatataagtcgtttgacggcgtgctgtttgatacagaagaaaacagtttggtttcatatccgcccggaaaggcaaacgacgaatatactgttcctgaaaatattgcagaaattgaagaatccgcttttatggataataaaattttgacaggaataactataggaaatataaaggaaataggggataaagcgttttttggctgtgagaagctctacgatgtaaatatttcaggagtggaagaagtaggagagctcgccttttatagatgttcgtctatggttaaaataattctgcccgaaaatacaagagcagtaggaaaaaatgcttttaaaaactgcacaaacctagaacttgcggcattttacggcaatgatacaaagtttgataaagacgtttttgaaggagcttcacaggcggcgatagccgggaatgaacattcttctgtaatggaatatgctaataataatgaaatcccgttttatcaaattgttaatgtaatatacggcggaaataacgttaattttgaccctatggcttttgttgtgaataattcaaccaccttggttcctatgagagcggtgtttgaaatgctgggcgctgatgtagactgggatgaaaccagcagcactgcgattgcttcaaaagatggaataactgtttcaattcagattggaagcagcattctttacagaaatggtgaggctattaccctgagcgaagcagggaggttgacagcagacaaaacctatgttccgctcagagcagtttccgaagcttttggaaacgatgttcaatgggacggcgaaaccgccgcagttataataaattaacaaataagaaaaaactggaaaaaagttgtaaaaaaagtattgacaatggtttttatgtgtgataaaatcaaaatgtaataaagaatgggttgtttcccattataattattaaattaatctaatatttggcaaaggaaatgaaagtttctgacgcaaagttaagagtctaagcttctgtttttgaagtatgattgtctagctgcaatgtttgagcaaaaacgctcacaatattgcagctttttaaatgtccacaataaagtgtttatcagctttattacaggtaataatattaatatgattgttttataaggagatggaaattatgaagaaattattgtgtattgttttaacaattgttctcggtatctctatgttttcagtcacctcagtctttgcagcaagcgtaacaaatgatattcccgggacagacagcaaatgtccgctttatgttgaaaacgaggctcggtttattgcgagcggctcaatttacggcggtactgcatatgtaaaaaacggtccgttttatgcaaacggcggtaaggataactggtatatagacggcagagctttagcagataaactaatgattggcgaaggcgcagaaattgatttaaaaaataatgatgttaaggaattggccaatatcgaacgctatgttcctgataatacttcctttgaagcttttaggtttgatacggacaatatcccgggaagcgaattttttgaaggcagcaaatataatgacggaacgcgcaatgtaactatagggtggagccaaagctcttggggaaacaacgatacttatcagtctaattatacactttctgaaaattcatattttaatgaactgacaataagtgatactcttgatatgaacatatatgttcctgaaggcgagataagaattataagagcggaaaaggttaactttaaaggagctttgaaaattcaaggcggaggcaaagttataatctatacaaacgacattttcggcggcggaggttatcctaattctaactctttaataaatgcaacaaacagcgtttatggaaatcccgacagcttgacattcgtatatacgggaaacgttttaaatctttcaaactttgcaaagatatcctgtaatattatttcattgtctaaaaaggtgaacgtcagcaatattgacttcaacggaaacatttattcaaccggtgatatgaagttttcaggaacgtctgttgttcacggtatgatttacgctcctgaatctaatgtgacggttacagctcagtcgataatatacggcttaacagtctgcgatacagcggaagcaagcggcaccggaacatttgcggttggcgacgctaaaactatagacagtgaaataatagatacaataataaacggcggagaaacaaaacccgaacctactgaagccccggcgactgaaccgccgtcagcaacggaaaatcctattccgacagatagccctatagataagaatacagccagggttgtaagatatattgttgaatcgggtgagtattcgctcggtactatgagaataatggatcatacgcctatcggacatgaagacctgaaatataaagttttggacgaatcttcttatgtgataacaggtccgcaggatattgacggttatgatgttataaaacataaagttcagcgtatcttgaataccacagacgatgtttttgttcagagagaaaatgaaatcgtttacagccgtttcggcagggtagactcaaacggttatgacacgtctttaactatagctccttatgttgtgccgcagattgatgatgaggttaacacaatgtggctcgcattcggcgacagaaacggcaaggttcaaacagtttggatggtaatagaataagcgctgatgattgaatatctgacaattcaacaattattaatttaagtaattattgcagagactgctctttaaaacgggcagtctttttttagtaaaatttgtttgtaattagaggtttaaattaattgacacaatttatataataatatataattatccaaatagcaaaagttaacaaagggtgagaaatatgctgaaaaaaattgattttgaccaaggattaaataatataaatcttataaagacgtcgcatgcgtcacaaaaagcagctgcggagggaattgttcttcttaaaaatgaaaatggcgtgctgcctttaaaatccggaatgaaaatatcggttttcggcaggagccagctggattataacaccggcggaaccggctcgggcggaagcgttaatgttttatatgtggctgacatattaaacagtctgagaaaaaaactgaaaataaaggtaaacgaagagttggcggctgtgtatgaagaatggataaaaaataatcctatttcaacaggcctgggcgtgtgggccgcgagacctcattttcagaaagagatgacagtgacgagtgaaattgccgctaaggcagcagagcattctgagactgctttaatcattatcggcagaacagcaggagaagagcaggacaattttaacggcgaaggcagttaccgccttacccagcaggagcatttaatgctgaaaaacgtcactgatgtttttgataagacggttgttctgcttaacacgtcaaacataatagatatgaaatgggtcgacgagtataatatcgacagtgttttatatatttggcagggaggtcaggagggcggagaagccgttgccgacatactctgcggtgataagtgccccagcggcagactgactgacacaatagcgaataattatactgattatccgttgtctgataattttggcagcaaggaagaaaatgtgtatagagaggatatttatgttggatacagatattttgaaacctttgcaaaggagaaggtaaagtatccgtttggttttggcttgtcgtatacggattttaaaataacatgtgctgatttcagaattgaaaacgatatagtaaagtttgagacggcagtaaaaaacgtcggcaaagtttcgggcaaggaggttgttcaggtttattttactccgcccgaagggaaaatcaataagcctaaaatgcagctggcggcgttttataaaacaaaaacattgctgcccggagaaagtcataaaaagacggtttcgtttcctatgagccgtatgtcttcatttgatgattcaggacatacaggggcggacaataggttctgctattgtctggaaaagggcgagtataaggttctgataggtaaaaatgtcagagacccggagttctgcactttttcttttaagcttaatgaaactaagatagttaaaaaatgtgtttcagcactggctccgcaccaaaagtttacatgtatgaagggaaagcccggaggcgggtacgactatgtaaacgtaccgcaaagagaatatgatatcagaaaaaggatagaggacaaccttcctgacagagttgaactcactattgataagggatataaacttgcggatgttaagaatggaaaagtgagcatggataagtttataggtcagctcactattgaggatttggcttgtttagtccgcggcgagggaatgggaagcaagagagtaagaccggggacgggatgtgcgtttggcggcgtttcaagcaggcttttggattttggaattccggtggccgccggaaccgacggaccgtccgggctcaggttcgacaatggtgacgcggcgtcgctggttccgataggaacaatgcttgcgtgcacctggaacacaccgctggttagagaggtttataaatgtattggcggcgagatgctggcaaatgatattgacctgttgctagggccgggtatgaatatccacagaaacccgctgtgcggaaggaactttgaatattattccgaagacccatatataagcggagttatggcgggggcggcaataaatggtctgagtgataagggcgttatgggaacgctgaaacatttggcggcaaacaatcaggagacaaagaggaagcgtgttaattctgtagtctctgagagagcagtaagggaaatatatttaaaagggttggaatatgccttagaatgctcaaagcctacggctataatgacgtcttataatccgttgaacgggcagtggtgcggctcgaattacgatttaaccactacaataataagaaacgagtttggatatagcggagtaataatgactgactggtgggcaagcatgaatgagattggcagtcatgtggcgacaaaggaaaatacagccgcaatgctcaggtcaggcaccgatatttatatggtagttaacgatccggagcataacagcggaaaggacaataccattagggctataggctccggcgatttgaccttgggagaactccaaaaagcggccaagaatatctgcggactgcttatcaacctgccctgcatggaaagagaatccatagttcaaaggggacgcggagctttaagcagaataaagaaaaaattaatttggtggaagtgttagaataattttatagtgatttatagttcatgatttattgataattataaaagggcagggagtgtgttttatgaaaaagacaattctgttaacagcggttgtatttattatttttcaaagtttagcggtttgcgcttccggcgatattgaagataacagcgtgtttaatgatatttatgataataacacaacgtttgtcagcgatattgagtattggcaaagcaaaggcgttatagaaggcgatggctttggcagatttgagccgttagagagagttactcgggcagagttggttaaaatggccgtgctggcagccgaaaaaacagagatttcgggaggggcggaacctgaattttctgatgtgagtgaggacaactggttctatccctatgtcaaaattgcttatcagaacaagattattaaggggaacgaaaacggttcttttgaacctgacaaatatgttgattttatggatatcggcactatttgttaccgtgcgtttcaaaagccttcaatggtgtcctttttcggcgatactccaaggcgctgtgacgctgttcatgttttaagtatgtttgaaagttctgagaatacactaattcaggttgacggagccatagagaaatctttccctgaatttggtttgtacaaaacggtttcagaagctctccgggcagcgcctgaagctgacagtgaagaaaacagagtgtatatatacataagccccggaacgtatcgtgaaagaatttggatagacaagccatttttgacgtttgaaaaaaatcctgaatacagagacctgccgaatgaggttttattgactttttattacggagcttcaagaaattataaaagctatgataatttaagccctgaaatggaatatccggctgattgttcttctgatgaagaatttgcaaaattggtaaaggagtatgaaagcaaaaagtcattgctgaacggaaagccatatgtcaaatctgacggatatataagcggtgtgggaacgcaaaacagcgccagcgttacgattacagaaaatgcgcatgattttatagctcaaaatataacgtttgaaaactcatataatatttacaagtctgacgaagagcaggaggatatatatgagcctgtcagtgaaacagacgttttgctgaaagaaaatttggatactaaaaagcgcaatgaagcttggtaccaatccgccaaagccagaaaggctgatgtgactgtgagcgaaagcaaagacgcgcagacccaggctgtggcagtcagatgttcggcggacagaagtttctttaacaactgccgttttatagggcggcaggacacactatatattaaggataaagccagatgctattttcttttgtcatatattgagggaactgtagattttatattcggagatgcgaacgcagtgtttaattactgcaatattcaaagccgcgcatatccaaatgggggatatataaccgcaggttcgcattcggaacagcagaccaggggatttctgttttattgctgccgcttaaacggtgatgatgagttatcacagctggaaaacagcggcaaagttaaattaggcagaccgtggaagcagggagcaatttctgtattttataaatgttatatgggcgaccatatagcagtgggagaagaccgttttgcggacatgggcggcagtaaaaaggagaacgcccgtttcatggaaatgagcagccgtgatttagacgggaattatcttgaaggcgtatattcgagttatgaatacactgaagactgcagatataagtatttgaatgacaaaaaatatgtttcatccggttttgataagaaaaacaatgccgctatggagcctgataactggaatccaggaaaaggaataattttggaaatgtttgatgacggcgaaatagtagacggcgtacccgtatggtatgataataataatgaatacttcatacctgaattataaaaatgaatttgatataatttagatacagtatttttataatttattatataattaatatctaacatacggtgttaatagtgaacatcgttaggtgtgaccacacttttcttaaaaagtgtggtcacagccatgtcaaagcttgctaaatcacattttttataagaaatttttaggaattaatatcttcaaaacagtatttttggtgaacatcggtaggatgtgcgtaagcacatctcgttaggtgagcaaccatctcacgcgaagcgtgaatatactaataacatttgtcataatccttttataaaatctgttccgtgactgcgcgcctaacgaggcaaactacgtttgcacatcacaactaagtttgattattgacattgtaggtttattaatacaaagtgatttgtatcacacacactttaaaaaagtgtggtcacagccctccgaagcttgctaaatcacatttattggcagcgaagtatctttaggactgctgtcaaccattatttcaaaagtatcatccatatctaacgcatataaaccaatagattttaaaggttcattggcagcgaagtatctttaggactgctgtcaaccattatttcaaaagtatcatccatatctaacgcatataaaccaatagattttttcttgtttcataagacttttcagctctaaaagcgtcttctattgtcattgcaaacgcttctccatattgtttttctatataactttttatttttagttttgtcgcttctacacttaattgtttttaatatacttacttacgaataaaaaactgaaacggagttatatgtatttcttaactatttaaaaaggaagtatttaatggatttttattttaaatagttaattatttttatatggcatttgtccctgtttgcggagtatgcggtaaagacctgtaatagaacgagtatagcctctttgacgaagcttaacccaaaacacaacaagtccggcattaggattacggcggcgcatatcagtaatcaatttcaactcatcagcggtatgctgattgggatgatggtgaggtttatgtgatttatcggctaaggatacaacataatcaaaattatgtgataactaagttcatcttatcaagctgtcttagatgaaccgaaccactttccatggtatatatccgcgttgtatttatatttgtatgtcctaaaatgtcggctaaccttgataaatccttttcttctgaataatatatttttgcaaaaagatgcctgagattatgtggaaaaaccttttctgattttactcctgactcttcacataaatttttcatctctctccatatatttgaccggtctattggttttccgctctttgttataaagatacatccctttgaaatgctttgtctttttatatatatttttaaaattttacaaagtttcacaggaataaatattattcttctttttcctttattgttaatttctgctttacctttataaacggcttcaacagttatataacttaactcagagaccctaattcctgtagcacatatagtttgtataataagagatagtcttttattatttaatttttcagcagtcttaattaatctaaaatattcgtttttagataattcttttttctcatcgcaaaatatatttttctgaatctttaacggttttatttttaaatcgccccaaccgttatattctaaaaaaccgttagcggcagctaatattgtattaacgcttgaagcggaataactttctgccaatagctttttccattcaataagcagtattttactcaattctttttcttcaaaatatttatacattctttttatatcttgtatatactttcttattgttgacaagcttttttcttgttccattaaataaacttcatattctttaattttttctgaccttattattctttcctcagcagttatcatattttttacctccttaaatacttattttatctaaaataattgaaatacatactaaagatttaatatgaagtccatttcatactaaagtttttattttgtcaaaaaactaaacttaaaatttgataatttttaaaaaaactaatataaaaaaacaattatttaatttgaaatacaaaacatactgttcttatacaacttaattcaaaacataaaaattttttattaaattatgaaattttttaaaagtactattgacaacactaactgtatatgttatagtcacagtataattgtatttaaaaaagtcacagtttataaataatgaataggagtaacaaaatgacgggaaatttctgtgtagctgttcacgcattggtctatctaaaccataaaggtgaaactgtatcaagtgaaaaattagctgaaaatatctgcactaatcctacgcgcgtccgaaaagttatgtcaatgcttaagaaaaaaggtcttgtaaagtcgcaggaaggccttgacgggggttatattttatcagacaaaaaagaaaatatatctctaggtcaaatactcgacgctataaatgaaaaaactgtctgtcttaattggcacagcggcgatgatgatatggattgtttaatagcctcaggtatggccggaattatggacgacattgttgaaaacttaaattgttcatgtaaagactatctggataaaacaacaataaaaacaattgacagcaaaatatttaaataaaaacacggtatgttaatccatttaagtataattaattataactaagataacaatataaaatgttatgctaatttaataaattaactttaaaaattataataagaggtgaatttatgccattttcattagagcagggaatttcaattataactgtattttttcaaggtattataagttttttctctccgtgcacacttccgctaataccactttacataagttatttggcaggaggaagcaaatacaccggcagcgatggaaaaataatttatcccagaaaaaaaatatttattaatactatatgttttgtattaggtatcagttttaccttttttctgctgggctttagtttttctatgctgggtcagttttttaataaatataaatatgtttttatgataataagcggattaataatgataatattcggattataccaatttggaatatttaaacgccgtaatattatagaatcagaacaccgcctgccctttaatatcggaaagtttgccatgaacccgctgaccgcgtttgttttaggtttcactttcagtttcgcatggacgccgtgtataggtcctgtactcagcagcgtattattaatggtatcggcttccgattcaaaacttatcggctttttactaataggtgtatatacgttaggatttattataccattcctgcttgtcggtctttttaccggcactgtacttgatttgtttaaaagacatcagaacatagtaaaatataccgttaaaataggagccgttttgttaattataatgggaataatgacaataacaggattcatgaacggtattaacagttatatagcatctgtcacaaatacaagcagctcagagaaacaaaccgaaaataataattctgctgaaaataatataacctaccaaacaccaaatcctgaaataactcctgctcctacaaaaaaacctaaaaagaatacctcactggctcctgactttgaattaactgatcaatatggacaaactcacaaactgtccgattataaaggaaaagtagtatttataaatttttgggccacatggtgcggatattgtaaagaagaaatgcctgatatagaaaaattatatcatgaatatggagaaaacagtcaagacgttattatattaggcgcggcaaatccgcgttcagaaaaataccctaataattcagatgtcagtcaggaagaaattcaagagtttcttgatgagtataacttaactttcccggttctcatggataaaacaggagatgtttttaaatcgtacagtatcatgagtcttcctacaacttttataatcaatagggacggaagcgtttttggatatatacccggcgctatgtcggctgataatatgaaagatgctataagcaaagcaatgcaataaataaaattcataaactttacaatatatctttgatatgatataattcaccacaatataacaatatatggaagtgataaaatgttaaaactacaaaatataaattggaccctagaaaacggaactcaaataattaaagatataaatcttgatatacctgatggcaagctgatagttataaccggaccgaacggcggcggaaaaacaacgctggcaaaaattattgccggaatagaaaagccgacttcaggaaaaatatttttagataatacagatatttccgactatgatataactgaacgtgcaaaagccggaataagctatgctctgcagcagcctgtcaggtttaaaggcataacagtcagaaatctgcttgaactcgcttcaggaaaagaattgtcaatagatgagctctgtgaacttttaggaaaagtagggctttgtacttatgattatatagacagggaaatcaattcttcactttcaggaggagagataaaaagaattgagatagccagcgtactggcaagaaaaactaagctgactatttttgacgagcctgaggcaggtatagatttatggagcttcaccggacttataaaagtttttgaagaactaaaatcaaaacataaaggcacgcagataataatttcacaccaggaaagaattttggaaatagcagatgaaattatagttattgccgacggacttgtcagaacaaacggtcaaaaagatgagataatgccaatattgctggaaaatgaatatggacagcactgtcctgaaggaaaggaggaagtgtatagtgaataaaattactgatgaacttttaaaaattgtttcagactttacaggtgaatttaaaggcgcgttcaatatcagagaaaacggtgagtgtgcaggaagacaatcaagtaaaaatattcagattgaatccaaaaaagatgctcccggtcttgtaataaaaattgctgaaaatacaaaagatgaaacagtttatatacccgcctgcgtaacgcacggaaactttgacgatttagtttataatgatttttatgtagggaaaaatgctgatgtcactatagttgccggatgcggagttcacactgatacagaagaagacgcaagacataatggtatacacaagtttattcttgaggaaaatgcaaaagttttatatcaggaaaaacatattggaaccggaaaaggtacaggagctaagaaaatagaccctgtaaccgaatgtgaattaaaaaagggttcttcattaactatggatacaattcaaataggaggagtggataaaactacccgtaagactacagcaagcctgggtgaagatgcaaaactgataatccgtgaaagaatcatgactgacggtgatgaaacagccgatactgattttacagtatctctgaacggaaaaaattcagctgctgacgtagtttcacgttctgtagcaaaaggaaattcaaaacagagttatatttctaatataattggcaataatatatctaaaggacatactgaatgtgacgctatacttgttgataacggtacagttacagcttcaccgagactgacggcaaataactgtgattctgaattaattcatgaagcggcaattggaaagatagcgggagaacaattacttaaactcagaactttaggattaacggaagaagaagctgaacagaagataattcaaggttttataggtgaataataaacgaccatactattattgttatttttataatgattttagtatggtctttataataatatataatatatatatttatagttgaagatgctgttgttggtacggtgagaaatgtagataacttatttttataaacgctgtaacttaattttaacatgttgataaagtgtttgtaaacgaattgaaatattaacattttataccacaaaaagtgggtttaatgttacacacattttaccaacatattacaaatattacaaatgtgtataactttgattatatttatgtaatattttatttaatttaaatctagtgttttaaatctcttaaatagtcaattaatacaactaacatccacagcattccaagggaacctaggatatagtaaaggtgttttactaaatatgcaaagtttatcatagaaaacggcaggattattacaaaaagtaatatggatattattattcttctttttagagttattatgttaaaataagataatattccatatccttctgatacagcggtggtaaagatagacatcatcagacagattgagtagatactttcgaaatttttgtctattaaacctgcaagtttttgcagaggaaagctttcataccaaacagtgctgaaattcataccgatagcaaaccaaaccaagaatataagcagaccgattatagaacctgctattgctgaacttataagtattgtttttctgtcttttacctcttttgtcagcggtgacagtacagaagccgctgtcagggtattatagcttacatagcacacagcaagaaaaatcatatttctgcctgaacctgataaaaagtctgttaaaaaaaatgttggggagtatattttagacagtattgagaaaattgatataaaaagtatagttaccgtgataataggaactaaaataatatttattgccgcaatacctttaatgtcaaaaataaaaactataaaacaaagtgcagacaggataacagcccctgcaagttttgggataccaaaaacgtttgtaaatatttctccgcatgatgaaagcatgacaataagaccgcatgtcaagtcgaaaaatattaatacaagaaagaacttttgaagtatcttagagaaactcaaagtatgttttacatagtctgatatagtatagagttcatacttcattgacttttttaatatagcgtaacaaacaaatataaataaaatggacgctatacatacacctgtatagtcagtatttgaacaaaagttgaaatattcacaaatttctctgccggaagcaaatccggctccaattataaggcctatataaacaaaaataattttaagacaattcatattatcaccactttgtataaagttaaaatcaatatattttgtatgagcttttataatataactatatatagtggacatgcttttatatgaataaatatgggaatttttttaaaaaatattattgacaagcgtagaaatttgtgttattattgtatctgcctcgtgaaagaggctttatttgtgttaggaatttgaggtgataattatgcaaacaaagattacattagcttgtaccgaatgtaagcaaagaaattacgatactacaaagaataagcagaactgccctgacagacttgagcttaaaaaatactgcagattttgtagaaaacacactgtccataaagaaacgaaataattagaggtgtagagaaatggaacaaaccaaaccgagtttcttcaatagagttgcaaaatactttaaagaagttaagtctgaaatgaaaaaggttatctggcctacatttgcaaaagttagacagaatactcttattgttatgctctatgttgttatagttggtatagttatttggggacttgacgctctctttacttggggtatgtcacttatcattagtagatagcaaaggtgattttttatgtcagacaaaaataaagcgaaatggtatgttgcccatacatattccggttatgagaataaagttatggacgatattttaaagaccgtagagaacagaggaatggaagatgttatccaggaagtccgcgttcctatggaagaggttatcgaaataaaagataacaaaaagaaagtctcagaacgtaaagtatttcccagttatgttatgattaagatgattatgaatgatgacagctggtacgtggttagaaactgccgcggtgttactggatttgtaggacccggatctaaaccggtagctctcacacaggaagaggttgagagtatgggacttgagcatacagtgataaaatttgactataacgttggcgacaatattagagtaaaatatggagctcttgaaggatttttgggtgtaatcactgagataaatcttgataagaagaaggttaaagcaactgtttcaatgtttggaagagatacggatgttgaacttgagtttaaccaaatagaatcaatagcataaatttgttacccacacggattattccgtttatatataccgaaattaatcggtctgtgggaggggcctagtcccgataataccacgcatgtgtacaaggaggtgtaaatcacaatggcacagaaagttacaggttatattaaattgcagattcctgcaggaaaagctactcctgcaccgccggttggtcctgcacttggacagcacggtgtaaatattatggattttacaaagcagtttaatgagaaaacaaaaaatgacgctggcatgattatccctgttgttataacagtatatcaggatagatcattcacatttattactaaaactccgccggcaccggttttaattaagaaggcctgcggtcttgataaggcgtctggcgttccgaacaaaacaaaggttgcagaacttaaaaaagcagatcttaaagatattgctgagaagaagatgcaggatcttaacgccgcttctgttgaagccgctatgtcaatgattgccggaacagctcgttctatgggaatcactgttgaagagtaattattagttccgaataagacggataagtttggtgggaggaatattattattctgctgaaccacaataggaggatatagaatgaagaaaggcaaaaagtatcaagaagccgctaagcttgttgaaaagggtaaactttatgaccctcaggaagctttaagcgttgtttgtaaaaccgcaacggctaagtttgatgagacaattgagcttcatgttaagctcggtgttgattcaagacatgctgatcagcaggttagaggtgctgttgtacttcctaatggtaccggtaaaaaagtaagagttctcgtgtttgcacgtgacgataaggctgaagctgcaaaggcagccggagctgattatgtcggtgctgaagaactggctcagaaaatccagtctgagaattggtttgattttgatgtagttattgcaagccctgatatgatgggtgttgttggtagaataggtagagttcttggtcctaaaggacttatgcctaacccaaaagcaggtacggttactcctgatgttgctaaagctgttgaagaggctaaggcaggtaagattgagtatagacttgataaggcaaatattattcattgtcctatcggaaaagcttctttcggacctgaaaagctgggagctaactttaacgtattgatgggagctattataaaggctaaaccgtctgctgctaaaggtacctatttgaagtcagttactattgcttctacaatgggtccaggagttaaaatagctgcaaataagcttgaaaactaatttattttaggttgacaagttatagatattgtgttaaaatatcgacttgtcagaataattaatttgtaaaattatcttttatattccgtagacagcaggtggcagacgccataaatcctgccgaggatgatatgattatgtataattatgtccctcgcatgtctgcgagggatttttttacggaaggaggatttaaaattgccaagtgagaaagttttagaaaataaaaaagcgatggtaaaacagctgacagagagactgcaaaatgcacaggccggagttttggccgattatagaggtcttactgttgagcaggacacagaacttcgccgtaagcttcgtgaggcaaacgttgaatatacagttttaaagaacagtattatccgttttgctgctaaagaagttggtcttgaggatttagacagcgttttagaaggtcctacagctattgctacaagtaatgacgacgttatttctccggctaaggttctttgtgactttgctaagggaaatgatttgcttgaaatcaaagccggttttgttgaaggaaaagttatttcaattgatgaggttaagcagtatgcttcaattccatcaaaggaagttctcatttcaaagatgatgggttcattgcagtcacctatcagcaaacttgctcgtacattgcaggctatcgttacagaagaagctgtaccgggcggaaaagcagaagaaacagcagcacctgctgaagaggctcctgctgcagaagcgacagaaacacctgccgcagagtagtaaaatattaatttgtataaaataagctattaaatttagataatggaggaaaataaaatggcagatataacaaaaattcttgatgaaataaaagaacttacattaatggaagtaaacgatttggtaaaggctttagaagaagaattcggcgttagcgctgctgctcctgttatggttgcaggtgctgccggagctgctgaaggcggagcagaagaaaagtcagagtttgacgtagttcttgctggagcaggcgctcagaagataaaggttattaaggttgttcgtgagattacaggtcttggtcttgctgacgcaaaggctttagttgacggagctcctaagacaattaaggaagctgtatctaaggatgaagctgaagaaatgaagacaaagctcgaagaagttggagcacaaatcgaacttaaataattaaaaaattaagtttataccgctgtgattaatttcacagcggtttttgtttgatgagttatggtataaaaaaatttattaacaaaacttttagaaaaaatcatagtaatagtaaaaaggttaagggtcgaaaatatatcatttaataaaaaacatttatattagaatctcaattacatgataatttactattcatatttcacctgcttgaattttgatttaaaataattttctacatttttataacttatattttagttttattcttaatttgtttaccagatgtatcaactggatttttatcatttgtccatactataataagtaaactaactttatttttaataattgctacttaaaattcataatgtatataccatcatttaaattattatttaataaaaacttatattattatagagaaataaatgtcatacaataattattaagttatattatatagaaacatattattttataatccgtttccatcttccaaaattagagtaaatggaccatcattaattaattctaccttcatgtcggctccaaaaattccggattcaactttcttaaatttctgttttgcatattcaataaaataattatatattttttcggcatgagatggtgaacctgcgtttataaaacttggtctgttaccctttttgcagtcagcgtataatgtaaattgtgaaacaacaagcagttccccatctatctctattgatgataaatttgttttaccattactatccggaaatattctcagctttgatattttatcaactgctttttcagctttttctttatcgtcgttatcagaaattcccaaaagcgccaaatatccgttttctatcttgcctgttatcttatcttctacggatacactagcttttgatacccgttgtaaaactattttcattttatttgctccttctgttaattaaaaaatatacaaagccaattgcattttgtggttttaattactctatgttttgtatgtttctttataaggatattatcacccggagatagtttaagaatatttaaatctccatcatcgctcaatatttctaattctgcatatccggtaagaagacaaacaaactcatcctgatcttggtcataccacccggttgtatggccgtctgatattattttttctattctaatgtttgtactgtttaatagagtattaactatttcattttcaaacttatatgttggccggtcaaataaattttctatactaccaaatcctttcatattaatagattatattttatactttttttgtcaatttgtaaatatattaaattagagctttaattaatgttgtagattattaaagtttatatacattattttctgctttttgagactacgcacttaaagaggtacctatcggagctcttccgatgtttgctgaaaacaattttaatatctttgaaattaatttattatggttttacataagctatttctgttttctgagactgagcacctaaagaggtacctatcggtgctttaccgatatttgctgatataatcttaatatatttattatttattgattatgattttacctaataattttactatccatgactgcgcacctaacgaggcgtctgccgccgccctgccgatgtttgctaaaaacattttatttttactaattaattatatttagtaacaattttggttatacacctataattattaaatattatttatgtaattaaacatctaatataaacaaattaataattataaaaataataataaagtttttttagcaaacatcggcagggcggcgacagacgcctcgttaggtgcgcagtcatggatagtaaaattataaggtaaaattataaacgataagaaaaaatatataagagtgatttctagcgaacattagcagctctgttttaaatgaatagtaataaaaaaaataatataattaaaaaggaaaactataaaaaataagataattttcagcaaacatcggcagggcggcagcagacgcctcgttaggtgcgcagtcatggataacagaattattaggtaaaatcataaacgataagaaaaaatatataagagtgatttcgatttctagcgaaaattatcagctccgttttaaatggatagtagtaaaaaaaaaacgcacgcttgcgtgcacaacccaaaaacaaatttataaaacataaaaactcaaataaaaaataaaaatcaatgaacaacggtaggtgagcgaagcgaacgcgtgaggtgaatccacatcgcacgcttgcgtgcacaacccaaaaacaaatttataaaacataaaaactcaaataaaaaataaaaatcaatgaacaacggacataattttgattatgttgtatctatttaaataattgaataactatgtgactaatttcaatattattataacataattgtttatttgattacaagttaataatataaaattttacatattttttaaaatagacaacataaataagcagaatgaatatatatttttattccgcttgtttgttatgcaaaaatttattaaattgtatctaaattattatttataaaaaataataataatttttgttataaaaaataatactttatggcaagttattacaacataatcaaaattatgttgtatgtgatattatggtgatataactataacacaatttatgagttttccgtattctttttttctatttgtaacacatctattgtaatcctacaatttaaacaatatttttataaaaaaactattgacaataaacagctggttatgctattataatatagctgtttacgtggtccggtagttcagttggttagaatgccagcctgtcacgctggaggtcgtgggttcgaaccccatccggatcgccaatgctgccttagctcagttggcagagcacttccttggtaaggaagaggtcggcggttcgactccgctaggtagctccagactaaaagcctatagaaacattagtttcagggcttttttattttataataaatataaaacttgatattttattataatttatattttattaaaatatcactttgtaaatatgtttttaatctgtgaatatagcatgtattttataaagatttagccaatttaaatttttaaatatatgacgctattatattgaatattttttatataaaaacaattattatgtaatattatcctgagctttttaatttattaattaaaatttcttaaatcaaattactgtctgttggttaaatcattttttcaatcactgacatacttttaaataaaacctacactattaatcaatatatattttatttaaaattacagcatacaacctgtacgaaactatttacacgactgcataataaaatattcgtcaactaatcctattttttgacgaatataatatatcaatttatctataaatgagaaaataaaaacgccggaaaatttcggcgttttcacgtctttaatttaatatgccttttatctcaatagtttttttcgaagcgttcccccatctatccataagtaaaatgttatatttgccatttttcgaaaaaagaatataatcattttttatctgtttttcacggacaaccgtatctatattgtcaaaaatgcttgccgcctcatattctatttcgggaaaatatccttttattggctcctcctcagtgtatggttctatatatctatacgcagatacacaggaatcattaatgacatacttaactgaggcaaacggatttaaaactgactcaatattaactctacacgtatttctgaattcaggtatttcataatcgccatcacaatactctgtataataagactcaatctttggcctggctatacattcaacctttaccatctgaaaaatatccgtaccattctcggttattgcgtgaaatacatatttaccgttctgatatatactgaaaacacattgttcctgagcgtcaacaattttagcattgaacatattaatattatcattatataattctgagacctctttgtcaggattaaagtaatttaatttcacataatccatgacttttacacctacattaggttttagagaaagcattgccggataaaaatctaaatcatatttttcatctatattcttagatatacgttctggtttgtccagtttataatttatacttccattaaaattatatcttaaatcatattcgtatgtttcataaacaggttccatagaattcaaattattccatgtaaatacctttattaaattacctccatttctttcaagagaaatttgtctattcccaagttcaatattgcataaactacaatcttttccatcgtcaaaatatatcgccgctatgatttcacattgttcacctaaatccgtaagataatcaatataataagtgtctccgtcatttctaatgtcaatcttaggaattgtatctgttggaacgaatggaattgtatattttcgtgcatacagttctacacatgaaccttttataccatacagaatttttccatatatccaattataattcgaatatgtatctatagtaatagcatcatcttcaataacatcgactgtatcaggaaagacaatttcaataagtctatttccacagaatgcatttttacaaacagaaatcgttccgctgggaatttcatagcgacccatacggccggaaggatacgaaatcaatttagtttgtgaactatcataaagtaccccgtttacatccttataaatttcgttgccttcagctatttcataatcaacaaaattttcacccttaatcctaattccctgattatcatccttgatggactttggaacatatagtttagttatctgcctgcagaatgatagagcgtcttgactaatactgctggttccctccgctattcgcacttcacctcttttggcttgcggacacaaaatcaattcgcttttttctcctttagtatataacaaaccatcatcagagtaaaatacaggattatccgcatttacaattactttttcaagttctgaagttaagcatccgggaaatatttcaatcaaactgccgggaagctccagactctttaaaacatcacattgaccaaatgcatttaaagataacccctttaacccttccgaaaatataattgatctaagattacagcaatatccaaaagaattttccggcaaaaattccatactcttaggaatagttaccccctcaagactgcaaacattaaacgcattttccctgaaaccggttactccttcaggaattatgacctccccgatcttgttttcgggacaaataattagttcgtttaaatccttgttatacaaaattccatcaacagacctgaaattattattattctcattgacttttatttcagtcagatacggactcattgaatacattccaatcatttcgacactgcccggaatatcaatactgctaatattagattttaaaaatgctgaatccacaatttcagtaacgccttcaggtatagaataatgttcaagtgtcaatccgcagaaaattaatttcgacttattcgccgaaaacaaaattccatcctgactaatatattccacattgccttcagaaacatttactttttcaagaagttgaaaatcatgaaatacctcaggatttatatatgtaacggtatcgggtatattaatctcgactgtgctcggaattgaccccggcgcaactaaaccttctatacctgtgactgcataaccgcccaattgttccgggatatttaatattttatcatcggtataaggttcccaattatacaagagaataacagcgccaaaatctctcacttcatattcatagtttttatcacttagctgctcttcataaccaattgaaaataccggaacactcattgtcaaaacagatatcacaagcaatatcaataaacacttcttcatatataatcacctcaaattatttaccaggtatagtaattatactccgccttcatattattatcaaacaaacttaatttattacctgcagtagatctaactttatctgtaacaatcaatttataataattattaggataaaaaccttctatcccatttgtagatattggttttacactcactgctttctgagtcggcttatcatatatttgtaactggtcagctcttttaccattttgctctacgtacaaattatctatatttactgtagtctcatcaaccttattattaaattccaatcttaatgcatttacgttttttgaatcaattagattgcactctatacctaatgttgcagatttttgttgattatacaaaatgtcagcattgacaatttgccctgtgcactcctcaacttgaaaactattgaaatctgtttttcctctatttgaagtaaccttcagatctaaagttacttcttttttatcattttttagatatgacctgcatttttgaattaaaggcgttaaatcaaacgccacctgtgccgaggatgttgattttgtattgccgttaaaatcaaccgccggaagctgacctccatattcttgagttaaagaacttgatctagcattataaaatgcacacttgtttgtgctgacatattcattataatttaatggactggttacccctctcttcactgtgattgcaagtctgtcatttgtttcaagctcggctattccaatggccaacggcttataatatgcagtaggaatcacagtacaataaccttcaattggtttatagcttatcgtgtatttaacattattttgtattattgtttttgtagtcccgttcaataatttgtatggaagccatataaatccctcatctccccaaaaatctccccacgaatttacaactctaaacgctcctgtccctaatggagtatttatgttatcatcaaaaccaacaattgtcattgcatgcctgtcgttaatataccactttcgttctgaattatttatatatatctccggagacatattgatccaaaaacacccattattatttgttttcatattattgtcatatattgaatatgaaaaaaatgaaacgcagtaaccatttataagagtctgttttatttttgttatatcatagtttttattataagctactttacatttattactcatagcatcaatatatgtatctttttccgttggccaaatattaaagtcactttctattctgccaaatatttcgtatttatcgctttcatcatacaaattatcactaatcaatctatcgccggataaagaagcgcagccaagtgaatttaaagtatctctaacctcttcaaaatatgagcccatgtctattccaccatttgtcatactatataaccatctcggagacataacattatcaattattatattcccgttagtgtcctgagcacttgtatttcttacattattaaaattattggtcaattgataatacgcaaccgcccatgataaacatgaacctaacgaagcttggtcacctacaggaggaaaataggggtttggcgttgtcgtaccatcaattttagaattatccaccttttttaccgaagcaagtatcgattgccaattgctactttcagattctaacgacacctccgagttatatgtttcttctgggtcgtttttacttattataaactcttctcccattctgcaaggcacaattgtttccgctaaatttacgtcaccttcactttttatggctgctaaatacctatttaccgctcttgaatttggctctatcttatctatagatggagttgtattgaccacctcgttccattcttcatctgatggcatcaataaaccggttgaataaacagtttgctgaagttcttctgtatcttccgctgcaaaactcactaaattataactgtttattattataaataaaaataataatatacttaatattttgtataaataatttttcattttttatcctccctagtcaatcatagttggcgtaaccgatactattttaaacgggttttcaatatataatgtataattgcctacatccgcctttgtttttggtacaacggcgatataatatttgctaccaccaataaaatcctcggatattttaaaactaacatcatctctactacaatcagaatacaataaatgtttatttgcatcaaaaactaaacctttaacatttttaactgacttagcggtgaccacgtaagttccggttagttttggctcaaaactgactatgtcaacatcatctgcctgatttattatagcctccatagaaaaaggcatagtaaaactttggttaactgaatcaattgtacttgcgtaatcatctttgaaagtagtaattgaaaattcacctgtgtccccgtttgaattataaatttttaaataatattcttgacctgcgtaaaaataattatcaaatataaaaccatactgatgattaccataaatatcataccaaccattggtttttctcaataataactcctttgttccagaatatagttctgcattttcagctataattgatttacttattatattataaattccagattgtgtaggtgttagtttaaaccacattacctgtcccgcatattccatattgacatttattgtaccattttcaggtattgatataatatcgtttgctttattaatacttatgccatattcacctgtatcattttccccagataattttaaatagtaagtttggcccctaatcagctccttttcaattataaaatttatattttgtgagttgatatcatagctttcttctataagtatattattattatataatgctccctttatatttgtattaccatatgactgtataacataataaccagtttcattaggtacaaattttatacaatctatatcatttaaaaagttaatatcaccaactatttgccttccaatgccaacatttgtcgctttatcattgtcatttccgaaaaaatcctgtttatcatttgagagaataatgacaggtatagcaggctgcatatctatacctccgcccatacctaatattgaaattttggaattgtattggcttaaatcaaattgactcagtgcacaggtatttgaaaactctcttgtctctcccggttctatagttaattcacaactatcataaaacgtcaacaaagatggaacttttttaagaacataaaaaaagtaatttaacggtatactcgacgatctattattagttatactgacatcaacttttacatcactgccttgttttaatacattttcacaataaactccattacatgataatgttacatcaacatcgatatcatcaattgtcgaaattgatgataactctgcctcagtctcagataaaaatctagttgtatctaaaacctccatgttttctgttaactctattgagggaagcttggattcctgtagttcactgtcagataccaacggttgcatattatttttaatcgtctttgaaagactaagtggcatcatactgccatatcttatatcatttccttcacaaacaaatatcttaactttataatcatttacatttgcaggcacatataattgtggtaatagactccctatttcccctgaagcaatttccaaatgcacactagaatagtcaacaagtttatcattaccgtcatataatgcagttaataccattacattctgagttttctcctctgaatcattttgaattgtagcttttacaccatatgacgaatcaccttttagtatacttggcgcttgaacggaaagcaatgtaggtaccgcaatattattcggcggttctggacaaattggggtaatgtcagactcatgacctatattaaaaaacgaactttgtatttcaggctccccctcaatagtagcaaatacttgatatgtcccattcatatttccctttaaaggtatagataatgaataatatccaaccttattacttgtcacttgctctaaaacttctattccattactaggatttagaacccttataaagacttgtttaccaccctgtccggttgtatatccatttatagataaagtattctctttaatcgaagtattaatatcattattcatattagttatactcatatttacaggaacttcgcttataattccaagctgaccaaaatcatttttgccaaacgaccataattgaccatctttatcaagtacaattgaaaatgccccaccacctgtagcttgtataacattattaaattctccgaccttaaccggtgttttactggttccattattaccatttccaagttgtccgtccctgccttccccccacgcatacactgtcccattattaagtactgccatgctgtgggcatatgcggtaccgaccgattctacgttgtttatactttgtatggcggtaggaatatttctgttatttttatcaccaagtcctagttgaccaatagaattctttccccacgagtacactttattatcaacccctaaggctaaaatatgttctgaatctgttgatatctgtttaaaatcgcccgccaccaaatgcggttccgaagctctaatatcagcatcatttcccagttgcccatagtcgtttgctccccacgagactacactaccattagatatcaccgccataaatttatcaccacacgacaccttttctacagcatcaattaccattacttcagctggtgttccaggtaaatattctcctcgctcgccaagctttccgtcagttgaatttccccatgtccatattttagacgaaccatcatattctcttattgctgcactgaatccagttccggctgatatatcggtaatatgatctattcttgaaatcttagttggtatatataccttacctttaagatcatttccaagttcaccacttgaattattgccccaaccccaaacatatccattttcgtcaagtgccagtgtatgatttttgccttttgctacttttactattttaggtaacccttcaactttttgaggaaagtttatatttttattttcctgaccatgacctaaatcataatatgaaccgtctccccatgtgtatacgtttccgttttcatctaaagctaccacactatttctttttgcatcaacttggacaaatttacttccaaatggtattttaagtggattgtaactctgttgatttacatacttatcaggatttccgtttggcatatatccccacttatatatataacctaattcatcgctaatccatgtggatagttctcctgcggcaatgctattaaaatcagtgttaattgtttgtggtatatatgaatatatgttttcagtttcatatcctaattgtttataagtattatcaccccatgaatatgtattaccatccttatctattgcaaatgtagaattatatttagtaattattttttcaactccagttataggaactttatgaacataaggagtatcctctgaaatacctaattgcccatatgaattgtctccccatgaataaacatttccctttatgtccaacataaccgtatggttttcaccaacagatatgtctaatatatccttgtcgcgaacttcttcaatttcaccaaatcctacaatatcaaacccataatcaaatccagcttgatatttatcattttttccgcaaccatataaagttccgtttccttttaaatagaaactattgtcccctcctgcgaatgctttaataatatcaattcctgtttctttcggaacatttataaattctccatttataccaatttgactgtattcatttgacccccacatcatcaatgtattattattagttacagctaaagcatgatttttcccagctgatatactaacaatatcagataaaatttgatgaggaatattactgttttgatttgttccgtctcctaattgtcccttattatttaacccccatgtccatacggttccatctgctcttagtgcaacactaaaataatctcccgctgcaacctctactatatcttcaagtaactgaacacagctaaaatcagaatctagatttgttccgtttccgagctgaccatattcattagagccagatacatataattccccaccagagctaacatataaacaatgatttttccctgcagacattctggttcttgcattgcttaaattattccaatacccaacaattaaagtaggataaaaagtaccattacaagtaccattaccaaattgaccatatgaattgtctccccacatccacacattcccataactatcaatggcagctgcatgactatatgacaagataacttttgttatattagacaatgtactaatttgttctggtgacgttttgtttatcctatttcctatacctaattgtccatagtaattatatccaaatgaccacgctgtcccatcatttttaataataattgtataatctccatcagcacctatatcaattacatccgtgaaaacagttagtactgcattgctgtcctcggttatttccggcattcctaattgacctctactattcgttccccaaacatatacctctccttgattagttaaagccacagcatgatttgtaccacacgatacttttataatattagatacattcataactttaacaggtaatgtctgtgtcttttccgagccatcgccaagaatcttatgtacatttgaaccacaagcccatacagttccatcattttttaaaaaaatagtcgatttaggagtacccacaacttgctttacgtttgtaatactgagttgctcaggagaatatactatttccttgtttccgttacctaaactaccataggcattatccccccaggcaaacacactaccgtctgttttaatggcatacttattatagtaactcgcacttacagagtcaataccatataattcatttattctttttactatattttgattttcaccccaataccatacgtatccacaatcacataccgcaatacaaaaaccatttcctgctgaaatttgctttacatcaaataaaccataaacctgtacgggtatattactttctgtaaaagtcaagttaccaagctgaccataactattattgcctgcagcccagacagaaccattgcttttcaagaaatatgtattttcgccctcaacaacaacttgtttattttccagactgctaaacaactcccagctttccgtagatgttttctgatagtcattaatctcaaaatcatcatccggaattatattgacctcttcttttattgccggaactcctgtaaccgcaccgtaaagactgagcttgtttccatcaatcacactatcctttaaacacgtaagtttatcagatgtattctttagagtctcctttaaagtatcaactccaatactctgagccaatgctgcagcccccgttacaagtgcagccgacatactggttccatccattgtaccatattcgccatttggcaaacaactatatacgtcactaccaacagctgatatatcaacactgttaacaccatagtttgaaaaatatgacattcccaatccttgattcaacgacgctacactaattgtatttggtaagttaaaagctgccgggtatatcggcgtctcatctatatttattttattgtttccagaagcgcatacaaagaataatcctgattgctcaatagattcttttaatgccttattatcatccgtacttccaaaactacagtttactatagttaccccattctcttttgcatattttattgcttttattatatcgctagtgcgtgctttaccattttcaaatacttttaatggaactatctttgcattaggaacaatctttgcaattattccggctatatgtgttccatgcgattgttctaatcccaaatctacattatatacttcattgacatcattaacaaaatcccatccctctgttatatgttcggataaatatgggtgatttacatcaattcctgtatctatgactgctactgtcacattatcaccacggcttatttccaaagccatatttaaatctttatctatattatatagtctatcgtactcatttgattctggctcaagtgtttcatctgttatagaagtctctgtaatatttaatgaattataatcgtcactaatactagtatcttcaattatattatctgcagttactgtttgactatcagattcagttattaattctgtgtttgtttttccaaacatatccatcacataatcaggttgtaaatattcaaccacatctcctagttcatttataatattatctataaatgtatcagaatttacactttcatttaactctataacttcgaattcttctgtattgtccgtaagtttgctaacagtaacattttcattagattcagtttttattctgttctctttcattttaagtcttacaagcttctctttatcaatatttttaaaccttcttaaccgttcagactcctccttttctcttttttccattcctttttgatatgcagtttcacttacatttttaagttttgatatatcttttttattagcgtctttatatttaattatatatctatccttattttgcttttctgaatataaaatctcttgttcaacctgcataagttctttttcatcacttggtatattattatctacatcctcggccgtattaaattcattatcaaatgataaggcatcgtattttatcatttgattatttaatgatacactaaaaacatttgcgtttactggcaaaactgcttgaataaataatactacaacaaccaataaaagcactaaaaactttttcacacgcattagtaaacccctcctaaaaaatatataatataactctatattactagattaatttttccacctcaattctaaataaaatattatatttctataatcactgcaatttatatatagtataaaagctgtattttgtaaaatatttttcaaaaaactctttacacattatatcattgttacacaattagcacaagccaaacacaaattttcatcaatatccacaactaattgacacaataaacacattgcagcctgaaattatgtatatattcactaaacttgttttatcacaacttattttgttggaaaaataatattgaaaacatttattaaatttataatagaatatattcaatatgctgatagtataattatttataaattgatgtcgaacagtttatcatcttgaaatcttaataaattacatgaatgtagtattagaactaaaaataaataattaaagtcaaatataaaataaacattagtattgatttcttatagccgaagcttattattaaacataaaaatgttttctttaagatttttcaaaacttaaaaaattcacgaaggggattattgcattttattttgtaagttacttttaatgaatttcatagctgcatatgtttgaacatatcatttatactaaatagtttattactacttctccacatatcctgcaaatattattggattaacttatataaaacatatgaaaacaaaaataatataaaacatatatctaatacatactatttcatctcagactatagcttataataaaaaggaagaggtcggcggttcgactccgctaggtagctccaagagactatacagatgtatagtcttttttttatttattttccactctttaatatacagaatctaaccgaaacttttatttaaatttttttatcataataagatataaataagacaatccatgttttaaattctaaaaacattgcttaaaaatttatattcttagtttttatagagttctccggtcatataaaatttattgcttttttcgacccaatatgttataatatataaattaaatcttgtaaagtttatgtgatagatttacattttttataaaaattttaaagataaaaatgtaaaatataaataattatttgagaatcgtcttgaagggaagagtcgaatgttgcaaaaaaatataattcacgaaaatttaaacaatttttgcgttacttggtttaaaaatcgtgatgcgaaaagcgcggcagaatatttatctgatgacatcacctttgtcggcacgggacaaagtgaatatgaaaatggaaaaaccgacatgctaaattatattgagcgtgatatcgaggaaatatctgaaccttttgattatgaacttgtctttatccatgatcaaaagatttctgatgacgtatataaatcgtcagccgaaatgatactaaaaaactctctatacgaatggcatctcagagccttttttttggtagttaaggaaaacggccgctggctgattaacaatcttcatttcgccgagccaagcagcagccaacgagagcaagagcattatcctcaaacgctggttatgaaaaatacagcccaaattaggaataaacttttgaacgactctctggcaggcggtatgatgggcggatatttagaagaagggctgcccttttattttgtaaaccgtcaaatgctggactatttgggatatgataatgaaggagattttatagcagatataaacggattgataacaaactgcatgcatcctgacgacaggaaatctataaaaagagagattgataaacagcttaaagaaaataatgaatatgaagttgaatatcgcatgaagaaaaaagacggctcatatatatgggttcacgatttaagccgcactattattaccgagagcggaaagcccggcataatatcagtatgtatagacataactgctcaaaagaaaacacaagatgaaattctgcacatatataacaatattccgggcgccgtcttccgctgccggtttgactcaaaactctccattatagatgcaaatgacggattatatgactttttaggatataccagggaagaatttttagaaatgggcaattgtatggcttcaattctgcaccctgacgacatgaaaaaaattattgacgaactcagtatacaacttagaaacgggaacaccatagacaaagaaaaccgagttatatgtaagggcggaacagtaaaatggatatctgttaaggctcaattatttaaagaagaaaatgaagatagttgtttctattgcgtttttgtagatataaccgaaaagaaacgtcttcaggagcgggttaaggaattatatgagaacgagttaaaacactttgcggaacaatctccctctgaccgtataattcaagggcgtttgaatgttacccaaaatatcttggaaagctatacatcaacactcaacttagttcatgccaaagtcggagatacctacgataaaattatagagaatttgtcaaagtccgctgttgactccgagtacggagaaaaaattcttacttcgttaaacagagaaactgttcttcaaaatttcgcgttaggtaaaagcaactatcattttgactttctcagtcaaggaaatgataactcagttttttggtcaactacaagcttccgcttctgcgttaatcccgaaaatgataatataattgcatttttttatactttggacgttactgagcaaaagcttcaggaacaactgctcaggatgatagcagaaatagattatgatattataacagaaatagacataaataaaaaccaatacaaactcctttcattcaataaagaagatggaaacactttgcctcccagcggtaagtttcaagaggaaatcagaaatatagcagataaatttatggatgagaaatctacgaatgaataccttacaaaacttgatttcgattatataaaagaacaacttaaaacaaataaaacatattcatttataatagaaatgaaaaacatttatggcaagctccaaaccaaaaggctggaagtgttttatatcaataaggaacttggccgggtttgtatggcgcgcaccgatgtaacagatattgtggagaaagaaaaacatcaaaaggaggaactcgcctcagctctggttgctgcagaacaggcgaacgccgccaaaactgattttctatccaggatgagtcatgaaatccgtacacccatgaatgcaataataggtatgagcactattgcggcacaggctatcggaaacgatgaacaggtggcagactgtatttctaaaattggtatctcgtcacgttttctgctctcgcttataaacgatattcttgacatgagcagaatcgaaagcggtaaaatgcttttaaaatctgagaagatacctatagaagaattcttaaacggcatcaattcgatatgctactctcaagcagcggccaaaaatgttgaatacgagtgtatagttgatccaatactcgacgactattacatcggcgacgctatgaaacttcaacaggtattaataaatattctcagcaacgctataaagtttacaagcgagaacggtaaggtttctttttctgcttcagttcacagaaaattaaaaaacgacgcagttctgagatttattgtaaatgacaccggtataggaatgagcgataagtttattcctcatatattcgaaccgttttcacaggaatataccggaaccacctcactttacggcggaaccggtttgggattggcaatttctaaaaatattgttgatatgatggacggaaacataaccgtccgctctataaaagatataggaacagaatttacaattgacgtaaagcttggtatcagcgatgaggaattgcttcatcataaacataagaaaataacatataacttttcgcatctaaagacgctggttgtagatgatgatgtgacggtgtgtgaaagcgctgtcgttaccctcaaagaaatgggagttaaagccgaatgggtggacagcggcataaaggctattgaacgagtgaaagagctttacaataacaaaaaatatttcgacatgatactgatagattggaaaatgccggaattgaacggtatcgaaactgcacggcagataagagaaattgtcggccctgacgttacaattattattatgaccgcctatgactgggcttcaatagagcatgaagcaaagttagccggagtaaatatgcttatgagcaagcctatgtttaagtcgtctcttatttctgctttttctaaagcgatgggtgaaaaggaagagaaatcacagcaggcgaaaaccttggaatacgatttttcaggaaaacatattttactggttgaagataatatgataaacactgaagttgccgttatgctgcttaaatccaaaggattttctgtcgataccgccgaaaacggtctgcgcgctatagaaatatttaataaatctcaaaacggatattatgacgtaatcttaatggatatacgcatgccaataatggacggtctcaccgccgccagcaatatacgccacttaagcaacggcgacgccaaaactattccgataatagccatgaccgccaatgcttttgacgatgatatcgaaaaaagcaaggctgccggtatgaatgcacatttagcgaaaccaattgaacccgacaaattatatcaaacgctttatgattttatttttgaacaggataaataatatcaacgtactataaactggatctgtaataattttaaaatatgaaatataaaactgttttacaatttttacgacattaaatataaggaggtgaatattgtgtccgataaaaattctccggctatagaacaaataattacaatacttaataactctccgacagcaatatatgtgtcggccattgataattatgaactgctgtacataaacgaaaaggccagagacattctcgcgagcaactcaaccggtcaggaacgaacctgctatgaggctgccggtttcactcagccctgcccattctgtcagacgtccaaaatgagccgggataaatttatggttcgtgaattccaactacctattgattcgagcatatatcagcttagcggtaaaattattgattgggacggcagagaagcccatatcgaatacataacagatattactgagagaaaaaaggaagagaacaaatctaaggctgtcaaagaagaactacagactactttcagctgtattccatgcggattatgcgtatataaatttgaaaacggcaaaatatcgccgttgtttcataatcccgctttctatggaatcatgggttactcggaggaacatataaaagaaattgagaatgataccagctttctcggcgttcaccccgacgaccttcctgtattacaatctaaaattcaagatgctattttaaagggcggactcgtacaatatatataccgcgtctggaatgataataaaaatgaatatcgctggatacgtcttgatgggtcagttgaaacacaagccgacaatactaaatttttgtacggcgtttattctgatgttaataaacgggtactccttgaacaagaattgactgcagccaacgataaaatgcaggatattattaatgcaatccccggtggagtggcaatttataaagtatccgatatttttgaaactatctatttctcagacggcgtaccggaactttcaggatacacagtcgaagaataccacgaactcatcaaagaagacgctgccaaaatgacttattatgaagacaccgaaatggtggtatcaaatatacaggaagctataaaaaatcacaccgttaccgaattcgactttcgaaaacagcaccgtgacggacatatagtttgggtacatgttcaggcgaaacaaattggcgaagaggacggctgtccgctgatacactgcgtatttcataatatatcaaatctgaaagaaacgcagcttgagctagaccatctcgttaactctatccccggcggaattgccagttaccgtattgaagacggaaaatttattccaatatttttttctgacggcatagtggctttatccgggcatacccgtaaagaactagaagaaataactaaaaacaacgcattagaagtaatatatgaagccgataaaaaacgtgtttcggatgaagctgtatcagcgttaaaaagcggaagggttttagatatatcgtatagggtacaccacaaagacggttccctggtatggattcacctaaacgggcgccgtatgggaccgctttccgactcttcaagattttatgcggttattaccggcatgtcttctgaaaccagactgttccaaagtattgcaaatgaaaccgccgacggtatatatgttatcagcaaagatacctatgaattattttacacaaatgaatcgaaaaatcttttcctcaaagataatattactataggggaaaaatgttataaggcgcttttcggcaaaagcgccccatgtgaattttgcactctgaaaagtcacaaacctgacaactcggaacatgatatgttagttgacggaacagacaagttttacagcactcggtttcatgaaaccgactggaacggtatatccgcatatgtaaaatatgtgcgtgacgttacggaagaaactaaaatcaaatttgaaaaagaacggctgtctatgtattttcaaagcgttgtagaaaatctgccgggcggaataaccgtaatacggtatgaatctgacaacagcttaatccctgaatatatatccgaaggatttgcctccatgtgtcatatgacagtcgaggaagtggagaacatatataaaaacgatatatttgcaagctttcatcccgatgattcagacaatataaaaaataaagttctggattcaataaacagcggaaacagtcactgtgaactgacaggccggctaaaactaaaagacggcggttatatttgggtaaagagcaccatttcattaatacattcttcggatggagtcaaaagattatatacggttcatactgatataagcaaatccgtggaagaaaaggaacagctcagacagcagtacgaaaatatactgctgcagcactatcaggcacccgggcctgacaccctgattttgggacactgcaacataacgaaaaataaaatacttgaaattattgattatacggattcagatctcttaaagactttcggctatgtacgcaatgaattcttttccggcatagccggtttggtaacagatgaaaacgaacatcagcagtttcttgatacttatttaaacaaaccgtctttagaggcttatttaaaccatgatactgagaagatattaaaatgctttgttaagctgccgaaagaagaaaaaggacgttacgtacaatttaaagtaaatatgattgaggcgccggacagcggagatattaccggaatactgacagtgactgacattactgaacagacaatatccgaccgcattcttcatcagctttcaatcaccagctatgactatgtcattgatttaaatctttcaaacgattctttcactgtcctttcatgcaataagaacgcccattgtgcgccgccaaagtatggccgtcattcacaaagggttcttgatatggtcagcacagctatagtacccaaagacaaagctcagtattcaaaattacttgaaccggatgagatacgccgaagattaaaaaaagaaggttcatatacatttgcctatgctatttcagacgaaaaaggagacgtccggagtaaaaacatgactgtttcagctatagatttaaggcttgaccgtgtcagcctggtgtgttcagatattactgactctgtcagggaacagcaaggccttctcaatatgatagcatatacctttgacctggcgtgtctttttaacattgatgattcacgcttaacgctgtatacacgtcaaatcgtgcttgaaaatctgactccgtacattatagatgattacgataaaaaattaaatatttttgcaaaccaacaggatactgaaaaagaaaaagccgaattaaaaacgcggtttactatctcatcgatgattaaaaatctttcaaaaaaaccgtccggttatgactttgtgtatccgcagaagacagaagacggtctcagatacaaacaaatcaacgtgctttggggcgatgaaaaccaccgaacaatctgtatggtaagggcggatgtgacagatatgctcgccgccgaaaggcacactaaagaaaccttagaaagagctctcgagcttgctgaagaagcaaataaagcaaaaagtgactttctatccacaatgagccatgatatacgcacccctatgaatgcaattatcggaatgaccactttagctgaagttcatctcgacaaccgtgaaaaagtattagactgtcttaaaaaaatatctgtttcctcaaaacatctattaagtttggtaaatgatatcttagatatgagtaaaattgaacgttcaaagatagccatgaacatagttccggtatatcttcctgatttaataaaccaaatagccgtaattatcgaacctcaggcgaaggaagccgggcttaaatttaattacaagctaaaagaaatcaaacataattatttttggggcgattctctgcgtattaaccaaatacttattaacattttaaacaacgccgtaaagttcaacccgttcggaggaaaaattgattttacagttgaagaaatcccggcattaaagacaaataatgttcgtttttgttttacggtctctgataccggcgtcggaatgtctgaagagtttttaaagcatatttttgatccgtttgcgcgtgacagttcagctgccaagattgaaggcaccggtctcggtcttagtattactaaagggcttgttgaactaatgaacggaaaaatctccgttgacagcaaacctgatatcggcagcaccttcaaagttgaactcgaatataaaataaacaataacatagaaaaaacaatctccaaaaacaatactgaagattcgataccaaaagacaaaaacctatttttaggacggcgtttcttaatcgccgaagataatgacataaacgcagaaatactctgcggcctgctagatttatacggcgctgaatataccgttgaagagaacggagaaaaggcggtttctgcattttcctccgcggctcccggaacttatgacgccataataatggatatccagatgccaaaaatgaatggatatgaggcaacccgcgccataaggaacatcggaagcccagagtctaaaactataccgattatcgcaatgaccgcaaacgcctttgctgaggacatacagtctgcattagactccggaatgaacgcccatatatctaaacctgttgacgtaagcatactgctgaacactttaaatagattattaaaaaacaacaaggacggctaaaaaaataattggaggatattctatatgtttagaaaaatagtgttttttcagctcattataattttgacatctatttttcttctctcaggatgcacagaaaaaagtaaggttgtgagttatccaaataatcccgatacaacaacaataacttttttcggcaataaatacgagacagagaatgttagagttatagaagaaataatatcaaactttatgaaagaaaatcctgaaatcagagtttcttatgaaagtcttaaaggaaacgaatactatgaagcattggaaaagcgtattaaaacaggaaaagctgacgatgtttttatggtgaatcatgacattcttcttgagcttaaatcccggggcaaagtggctgacttatccggtctcagcacaatcccaaactatactgacagtatgctcagtcagatgaacgacaacggcagtatatactgggttcctactactgtttctgtttttggattatattgcaacaccgacttgctgaaaaaacataaacaaaaagtccccgaaaatttaggagaatggagaacagtatgcgattactttttagagcagggaacaacgccgataatagccaacaatgatatttcattaaagaccctagctataggaaaagggttctactcagcttatcaaaacaaaaaccagcaagaaatctttgagagtttaagttccggtgataaagttctaagtgattacttaggatccgggttctctcttgtcaatgaattcattgacaagggctatattgacgccgctaaaacccttaacactaaaaaaacttcagatgatttgacggaatttgtaaaaggaaacacgccgtttatgctgacaggagcttgggcagcaggacgcgttgctgaaatgtctcccgactttgagtttcaggttgttccctatcccgcattggacgatggctccttagaagtcattaatgctgatactaggcttagtataaactcagaaacggcaaatcttgacgaggcaataaaatttgttgaatattttacacgagatgagaacatacaaaaattcgctgaccagcaatcatcgttcagtccgcttaaaaacggttctccctctgctgttaaagaaattcagccgcttgtttcttgttatcaatcatcaagaacagtaataggaacagactctatgcttgatttgccgatttgggatttaacagccgacgcaactaaaaaattgctttcaggcgagtcttttgaatccacaatgcaatggatagacgaacaagccggttcggaaaggggtgctcctaatgaaacgtaacatttcaggcaatattaaaaagaaaattgctttcgccgcaattcttataggtattgttttagttacccttacacttctttttatacggggagttcaaaatcaattatgggaagaatctattacagctattatggaaaacactcagcaaggctgcaacactcttcggatccagctcaaaaacgattatgagtcaatgagtgtactctctaaagatataaaaaaatattccctaagccaaacaaatgaaatagaaacaattattaataactacggccatgtagaagaaaatataagtatgtataccgaagacggcagttatttcccaaaaggaaaccaaattgacaaaacagtgcaggagacggttttgaactctgatattacaaatggaattattgacccgcacatcagcagcataaccggggtaaacgtttttaatatatttataagaaccactatgaatgatggaacaaaagcctatttggtcaaagaatatgagatagaaaatatagttgaaagttttagtctctctttttataacgacgccggcttttcttatgtcatcaacaccaaaggagacgttttaatccgtcctccgcatccaaacagcaacaaaacagttaaaaatctttttgacatgcttcctaccggcaaaaatgacgcaaacaatattaaacagtttgcacagtcattagaaaacaacgacaccggctgggctatatttacataccaaaatgaaaaaactgtattctgtttcacaccgttacggctggagtctgactggtttttaatttcgataatacctaaaaatgttgtggacgctcaaacaaatgatatattaattcgttccatgcttcttataggctgtatacttttaggaataattctcttggcattattttatttccatcatgctaataagacaaataaaaaaataaccaaccaaacaaattatattggtcacctgtataacgccctcccggaaggggttgcactcataactgtaaaccagccgtttaagctgatacagctcaatcaagagggacttcggcttctgcattatcccgatggttcgctgaatgatgcgccaaaggggaaagagttaaaagatttcatttatcatgaagacgctgacagaattatcaaagattttacaaatgtatctctaaacagtcagagaaacacttttgaacacagaattgtcagaactgacggaagctttttctgggcctcagttattgtcgagaagacaatcagtgaaaatggagaaccggtgttaatcgccgcgtttcacgatataacaaaagaaaaattagccgaggaagccgcagagagggaaaaactccaggaaagaatcactcttgttaaagcgatctccaacgcctaccctgttattatcagtataaacctttccaaagacacactcaatttcatttatatgaaagagggactcatgattgggctcggaaagcaaaagacatataccgaactatataatcaaattgtttcaaccattcacactgacagtattgaagaatttaaagaaagatttgcacccgaaacgctgacagccgctttagggaaagaaaaaaatgaaatatttatcgaatgcaaacaaatcctttcggacaaaaaataccattggatttctacacaaataatatatgtagacaatccatattccaaagataaactagctatacttatttcacggcgtatagatgaacagcggtatgaagaagaacagagacggcaagcgcttcaaagcgcgctagacagcgctaaatcagcaagcgaggcaaaaagccagttcctatcaaatatgagccatgatataaggacgcctatgaacgctattttaggaatgaccgccattgccaccacgcatatagacgaccgggaacgcgtattagactgtctgaaaaaaattgggctttccagcaaccacttgctcagtcttattaacgatgtgcttgatatgtctaaaattgaaagcggcaaactttctcttagaaacgagccttttaactttgctgaacttgttgccgattctattgaattggtacgttcacaagccattgctaatcaactcaaactcaatgtgcgttttgatgtaatgaaaaacgaaaacgttatcggcgatcctctaagaatacgccaagtatatattaatattttaagcaacgcggttaagtataccaaacccggaggcacagtaagtattgaagtaaaacaaaggaagagtatacataaaggatatcagaactatatatttgtttgctctgatacaggaataggaatgagtcctgattttattgaaaaactatttcagccatttgaaaggtcaaacgattcatctgctgacaaaataaacggaaccggccttggtatggcaataactaaaaatataattgatttgatgaacggagatattcaggttgaaagcactctcggaaaaggttccgtcttcacagttacatttccgctgcagcttcaagacgccccaaaagatgaaattcctcatgaatggaagggaatacgctgtttgataattgacgatgatatacagtcatgcaaagacgcggcggaacttttagaggaaatagggttgagagcagaatatacaacagagggaaagactgcggtggaaaccgtaatccgcgaaaaggatacatcagacccattccgacttgtaatcgttgactggaaaatgcctgatatggacggtattgaaaccaccaggcagttaagacagaaaataggttctgaaattcctgtaatcattctcaccgcatatgactggtcggaaatagaacatgaggcgaaaaagtcaggcgtaacgtctttcatctccaaaccgttctatcgctcaaagttatgttacttgttgaatgagctaagcggagataacacttcagaagagtcaaataacatattagacattacaaatttgtccgacaaacatgtgctgctggttgaggataatgaaatcaaccgcgagattgcacgcacaataattaatgaaatgggtatacaaacagatgaggcaaaagacggagaagaagctgttaaaatagtatctgaatcagaaattggatactatgatttaattttaatggatatacaaatgccaaagatggatggttacagcgcaacaaaagctatccgactgctagacagggctgacgcttctgggattcccataatcgccatgacggcaaatgcctttgaagaggatatatgggcggcgcggagagcaggcatgaacgggcacctttctaaaccagtaaatatagaaaaattaaagtccactctgataaatgtattaaacggtaacagcgcggattaaaattctcttgttttagttttatcggcttgtaactgattttgacagaaccggtgaagatgtattttatttgcattacagtcatatcatacagaaagcaccaaaaaaattatatcaaactatttataaaataagtatttggtatatagtgacttttagatagaatgtgcagataagataaaagtaatactattgcggcagcagtatatgaatgtatatactcatacgctttactcaatttgtattatttaaattgagtaaattcacttattggaaaactcaaccccaaagcccccggcgggtatagttggaattttagaaaaccttattccatgcgggtttacagagttacgccgcaaatgatataacttgcatagcatattttattaatttataaacaaaaatgacgctgtttcatatatgtatacagcgtcatttttgttatacaattttggatttaattccatttcatttgactttattacaactctgtttaatattatccgtttgcgctctcaagtttaaaaaacacttttttagaatatagagatattcctatcgatacaacagccgctcccagcataatcgcccacggaaccatagaacatacgtcaaataataatccatacatcgcctgacctgcaggagcagcgcaattagcaaccgccataataagcgccattatttttccaatcaaatgggacggcgtctgctgctgaaccatagagcacatttgaatagtaaacattgtcgacagcgccattgccgcaaaactcataccggtgataagccagtatccaaccaatggcggaacaaatgaaaacagtccgattcccataacaagagccgaaacagaacacccggcaagcaacagataaccatttttaagttttagtcttcctccgataattcctccgagcagccctcctgccaaacctccaagaccaagcgccccctgagttatacccaaacttatatcgctcatttgaagtatatttacaaccataataggtattcctacaatcataacggaagagaaaattaaattaaaaagcgccagaataacaataaccggtacaaactcaggtttttcatttttgatatatctgccgctttcttttaagtcatccaaaactattgacgccatacttttttctgactttctctttttaaacggaatatgtataaaaatctccattactgccgaactaaggaaacacgctgtacttaccagcaatattggaacaagcccccaggcgccgaacaagatacctccgattataggacccaaaagacttgccagagtatttaccatgtttataacagcatttcccctcataatctgctcattttcaagcagtgccggaatacttgcctgaacggcaggctgatatgcgccggatatactgtagagcagcataaggcatacaatcataataggcacaatcggcagtataccgtgtatcaaatagaatactgcaatgatagccgccgttccaaagtctagaatcaccattatatttctcttgttgacccgatccgccagcactcctccaaacaatgagaaaattatcattggtataaatgaacacgccgtgaccgcgccaaacaaagacggcgatccggtttctctcagcaaatacagcggcagcgcaaaacgcagtatagcgttcccaaacagtgatataatttgccctataaccaccaatgtaaaatccttttgaaacaaaatctgttttttcatatttctctccttttacaaacagaccaacagtctgtataaattttatataaaactgctctatattgggcagcttattttattctttttcttttttatttattgatttactatattcaactaaagtgtcaattaactcttcatcaagaatctcaaaaccatatcctgacgttatttcattgtatacagcgcatcttgccttaacctcctcaggagttgtgggctttataagaggatgaagccaaacgtttgccaatattaaaagagcctctgcgagttcgtttggatgctctgtcttaattgaaccgtcttttattccctgctctaagattggttttatatataatggagcaacctcgttaaacacactttgtatttcaattgataaaaatttgggattatcaagcaagtatggcacaatatccattatccgcttctgacttggacaaagcaaagagactctaaaaatctccttaagcttttcgacccctgaaaggtcttctctggagactattttcctcagcactctctcactttcctgaccgactctgtcacacactctcaaaaatatttcttcttttgaggaaaaatgatggtatatagcgcccttggacagatttgttctatctattatatcctgaagcgatgtttcatcatatcccttttcagcaaaaagctttgccgctgtatctaatattaattttacggtctcctccggatatttatttcttgacattttttcaccccacttacagactaacggtctgtatattatatcagagagaaaattatttgtcaatataaatttattttaaaaactttatttgaaactgccgctaaagcggcagtttccaaacacttacatattaacggactttttccttcctgcagcagcacttgcagcaacagcagcctgatgatgaattcggctgccaaattgcatatagaaccacatccattgtcaaaggacctaaatactgtccgggctggtacataacgccgctgccgtcagcataaatattccagccgacgaaggtatatcctgttcgaacaggcatatcatcaggaatccaaacctcactggcgtcaggaatctgtatcggtgacggtatattttctgcaggcggaccactcgcgtcgtttggttcgaatattaacacacgccaaggaataataattgcccaatgagcatacagcgttatatcctcagaagttcctgacggtattacggttacctgagttccgcccaactcctcagtaaaccatccgacaaattggtatcccggaggcccgtcaagcggctgcaaaattatatcaggagaagtccccgtaaaggttgcaggatttgggttatatgcacccaaagtgtttaaataggttatcgtgtgaacagcctgatcaagaattatttgagttttatcactgctcagccgaactttccagtcatcgaaactatcaggcggctttataaacgcgtcagcgtcttgctgtgacaaaaccgggtatgaatcttctgacgccaccgccgccgctatagaattcccctcatcgtttggcgtaagataaggcgagttgtttaactgtatcttggagtcgggcagaatcctgctgttcaaaattggtactgatgaaacatcagatccaatatacactccgttttcaatatttcttgttcccataatgttgagttctgcggaattgtaaatacccggagctgttgcggcagaatttggattttcatcacctaaagagacactctcgcttaaatatacaacagaattgctttcgttgtatatacctcctcctgcatttgccttatttccatttatactgccgtttttgaaattaaataccgaagagttttttaaatatactccccctccgaattgacccgaaacattaccgtctatggttccttcctgcatatttataacggcgccgtccctagcatttattcctccgccgtttctgcgggctttattatctctgacctcaacagagtctgatagattcattgtaccatatgcgagatacacaccaccgccaccgttatttattaatccatttccgccaacagcagaattccgattcacttttgcactctcacacaaatttatcgttcctgccggaatattaaagtatattcctcctccattgccattgattgtctcgttgccatatatgcttgttgttccattgaccgtcaaactgctgttggttcctgcagcccaaacgccgcccccgacattatcagcaatattgccagatatatccgcgtcctgaataacagcgtttagctctcctgaaccaccggataaacgcagtcctccgccttcattgcctgatttattatcaatcaccgtatcttcaataaagtttagaaccatgggcgttgtgccgctattagtgcagattgctccgcctccgctgcctgccgcactgttattgctgatagtattattgtcaaagcttattttcccgccgtctccggcaatgcttattcctccgcctgcggaacctgctgtattctcatttattgtattttcactgaaagttaaatccgactttgctttgtcattaatatatatagctccgccctgataagaggaggaattattttcaaaattcacattgtttattgtttcagtcagaattttgtcggtactgttatttataatataaactcctccgccgtgtccgtttgacatattggtggaagtattaaaatcaatttgcgtccctgttaaatttatatttcctccgttctgagtctgtaaataaagaccgccgccgcttccggcactgttgtcctttagcgtaatatctaaaatctccgcatcagccgagctttcgtcctggaatatcatatatactcctcccccggccttaacagccgaattttgcgtgaattttgctccgcctgacaaactgaccgagtcgccattaaaggtgcccatataataaagtccgccgccatatccgccggccgtattattagtgaatttcacctcgttatttattgtcagagttaatggcactgtatttccatttataaaattagaacagtaaacccctccgccatctccttccgcttgatttccggtgaactgaacgttatcacccaaagtaaggtttccatttaccccctccaaatatgagcggaaatataaacctgcccctgaagaagctccgttattgcttatgaccgaccgtcctgtaataaaaacgctgtcgctgttatttctcagcgccgccataattccgccgccagtggttttggaataacatccggtcaccttggcattatcccgcatcaccaaagcgttggcgtagtttgcgtttcctgacatatatacagctccgccctcagtataagcgttattattttgaataaccgcgcctgtctccagggtcagtgttccgccggctaataatacggcagacctgtttgtgctgttatcgtttggatgtttccctgcatttccatcaagtataatatttcggagagttaaagcaccgcagtttgtaatactgaacatatttccaaagaaagattcacccttgaaaatagtacgaacattggctgaatcaatactgcttataacaacagcatatctgattaccagccgtgctgttagagttatatcagtatccacttgtatgaaactgtcatgtgcagctattgcagcctgcagttcactctgattattaacaattgccaatataatcacctactttttaaattatcgggcgcatttaataatatgctgtaaaactttgtaaagtgcagaaattatgacaaattacgcaaacccacatataatattttttacagcaaaattttcgctattgaataaaacatgcggctgtgttaaaatactgtttaatatcatcagctttggaggtgaaaatcatgcactttgttaaagctaaatccattctgtcttccaaaaacgggattaatatctataggggctgcagccacggctgtatatactgcgattcccgcagtacatgctataacatgagccacagttttgaagatattgaagttaaggaaaacgcccctgagcttttaagaaacgctctaataaaaaagcggcaaaaatgtatgattggaaccgggtctatgacagacccatatattcctatagagaaagagctgcgctataccagaaagtgtattgaaattatagatgaaatgaatttcggactcacaatacttacaaaatcttctttaattttaagagatttagatattttgaagaatataaataaaaactctaaatgcgtcgttcaaatgaccctgacaacctttgatgagaaactgtgtaaaatactcgaaccaaatacatcatcaacatatgagaggtttaagacactagaagcaatgcacgacgcaaatatacccgccattgtgtggctttgccctattcttccatatataaacgacagtgaagaaaatctgatcggcattttgaattactgtgtacgagccggggtaaaaggtataatctgctacggttttggtatgaccctgcgtgacggcagcagagaatatttttatcagaaattggacaaacattttccgggattaaaagagcgatatataagagactttggtgactcgtacatagtcactagccccaacaaccaaaaacttaccgacatatttttaaatgtttgccgtaaacatgatataatgaccgatgtaaaaagcatttttaaatatttgagcgcctacgaagataagaattttgaacagctgggattttaaatatctagctgaacggagtgttgactatgcagtttaaagacaaaaatattgaacaaataaaaattaccgtcttggttgaagacactaaaaacgaaaaccttccttcagcccatggattgagtttatatattgagacgcctgaaaataaaattctgtttgatatgggaccgaatgaactattttgggaaaatgctgaattccttggaataggtttaaatactgtggacactgctgttatatcccacgggcactatgaccacggcggagggctttcaacatttttagacaagaacaaaaatggaaaagtatatattagggaaaacgctttcggagattattattctacctcacaggggaaagcgcgatatatagggcttgacaaaaaactaaaaacaaatgacagacttatattaacagcaccgggaataacccaaatcagcagcaatctaactttattttcaagcgtggaaagtaaagaactatgccctaattcaaacaatgtactttggaaaatgacagaacacgggcttgtcaacgacaactttgagcacgaacagaatctgataataaaatcaggcaataggtatatacttgtcggaggctgcgcacataacggaataattaatattgaaaaaaaagcacaggaaatcatgggtaccgctccggatttcactatatcaggctttcatatgtccataccgggaagcggtcagagcgagccgcccgactttgtacaaaaagcggctaaccgtctcagagaaagcgaaactatacgttatacatgtcattgcacgggaagcgcttcatatgaactactaaaacaaaccctcggagaaaacttaaggcgtttgacgccgggctgtcagattatactttaacttttttatatcgtattataattcaatatattatttttaagattctatagaattctataaaattcatagtatctatttgccgccgactttctctctcagcggcatataaattactaagaaattttatattgataggccacaataaattgaacggaaatgttaaggttatatatcgtaaaaaaaatattaaaatataataaaaaatgtggttagcaagcttcggcagggccgtaaacacactttttttagtgtgtaataaaaatcactttgtatcgccaccaccctacaggtgtgatgatacctatcaatgttcactaaaagacactgtattgtgaatattaatctaaaaataatataaagatatggttttgcaagcatcggagggcaaacgcagtttgccgcgtaaggcgcgcagttgcggaaaatttattattaaaaatgattattacaaaattttttagtatgttcacactttgcgtgatttgacaactcacctaacgagacacgcaagcgcgcaatatatcacaactaaggtaattgttgacatctatagtttatataatatacacttttatttaaaagtatagccacaattgacattataggttaatcaaaacaaggcactttgtatcgccccaccctacaggtatgatgatacctaccgatgttcactaaaagacactgtattgtgaacattaatctaaaatattataaagatatggctttgcaagcatcggagggcaaacgcagtttgccgcgtaaggcgcgcagttgtggaaaatttattattaaaaatgattattacaaaaattttttagtatgttcacactttgcgtgatttgacaattcacctaacgagacacgcaaacgcgcgatacatcacaactgagtaatttattatatgacaactaagttaattattggcatctatagtttatatcacattatttagtttatataatatacacttttatttaaaagtgtagccacaattgaccttgcaggttaatcaaaacaagttattttgtatcacacccaccagaggtgggggcacaccactaaagaacactgtattgatgatattaatctaaaatattataaaataatatgattctgcaaacttcggaaggtgtgccccaccttccggcggcacaatagacatccttaattttttgttcagtctattgtatcctatcttctatgtgcaaggaagctatattgaaaaactattagcaatttataaaaataatatttataatttattattatctctgacttactataagaatattgtaacttacactgatatattttacactgacataatcagctcgttaaacaaaaaactaaataaaacaaaccccataaaaacatatgttttatggggtttatactatatatgttccaaatgttttatattatactatcttaaccgcatacaaatccggcagccatgttgatagatttgtaaatgttaatgtaccgtttgtcaggtcctgcggcagcgtaaatgttatcttgctcagctgcaactccttctctgctcctgccggagtcaatgttacagggctttctgttctctctgctgttgccaccactcccgaaccgtctgacaggctcattgttattcctctgttatacgctccgataaagtataccgtatgggttccggctgacaggtttattccgttcacatatgggtctcccaaagtatttgaagcatttgggtttcctataaaattcttatatccttttacatattcattatcaattgtcgtaccatttgagcagaacatatactgaacctctgttccgataaaatcatcacttattgcaaacgttcccgcctgctcattctgtctgcctttcgaaaatttaaaataaataaatataatggaatagatgtattaaaaagaaatataactaccgaaaacacacacataaacacttaatagtattttataactatcgagtgggaatgatatcacactcgcctgaaagccagtaaccgtgcgggttacaccgttctggatatatcttgtggcaacgttttggcaacacctgcaacataaattgtattgttccataaatatagagctaactgaatgggacgttcacaaggatatataaatcatataacatcaggaaaagcaatgccatccatgagcgaattttttgaaatatgtagatatttgggaataacgccatacgaattttttaatgaaaatataaggtaccctgaaaaaatacataaaataatagaaggaataaataaacttaatgaaaaggatacagaactgataattaatcttatagaaagttataaagataataataaaagatattaacaaatccgcgactgcgcacctaacgaggcgcataaatgcgccctattcccaaatatctacatatttcaaaaaattcgctcatggatggcattgcttttcctgatgttatatgatttatatatccttgtgaacgtcccatgtctaaactcatacatctttctgatacattttttctcattctcaattctgttattctttctcttataaaatcttcaaacatttatatcctctcctttttctatttttgttttataaaaattataataacatgaattggtcataaagtgtttttctgagtatttataagtactacaaataatttctaggaggaaatatgagggaacttgatacatttggaagaattttaatacctaaagaaataagaaaggaattaaatataaatgaaggagataaacttcatataagttgtatagataacactgtaatattgaagaaagttgataaaaatatttgtgataaatgcggagagaaatcatatacaaagcagttaaatttgtgtcaggaatgtatggaaaaattattaatataagtttgttatatattgaacactgcgtgttcagatgatagctcacctaacgcgcttgctatcgcaagcctaccgaagttcactgacccccaatttttttgtgttaaattaaattgaaaaatcaacttttttagtgagttaaataaataagaattcggaatatctattttcacggtagttcacaaagtcaacgggaaagtaacagggctttttcttttgtgcgtggagcacaaaagaaattagcgggggcgagcgccccttggagccgtaggcgacctaagcgagcaagcactttttctttggtgaagcgtttctttttcgtgccggaaaaagaaatggttcaaacaccctattatgtaataataaaatttttatatggggtcatatacaaagtatataaacagttttttagttaagtaaattaataaaaatttatatggtgtcatatgtaagaaacctttatatttgaataatacaattatatattgaacactatgtgttcagatgatagctcacctaacgcggcggccgatgccgccctaccgatgttcgctgaaccccaacttttttggtgaattaaattaatgggaactcggaacagctttttagtgaatcaaaataatcaaataaaatttgtattgtaatttataatataattctcgtattttcaagataagtgtgttacaattaacctatctacataaagtgggtgttaacacaacatataaataaaatatgagaacggagaaagagcatatgatgcgtgacgcagaaaaaactataggtaaccttattgataagcagggagtttcatatattgcgtctatttcagaagacggttttccaaatataaaggcaatgctgccgccccgcaagcggagaggtatcaaggaattttattttactacgaatacttcttctatgagagcagcacaatatagaaaaaatccaaacgccagcatttatttttgtgataagcgctttttcagaggggttatgcttgtcggcagtatggaagttttagaagattctgagaataaagaaatgatttggagagaaggcgacactatgtattatcctttgggagtaactgacccggattattgcgtgcttaaatttgtggcaaccggcggacgttattattccaactttaaatcggaaacgtttgaaattaattgatttgtatatttaaaatctaaccggcgaaaattatagctgaaggaagctttgtgtttgtttaaacctatcggagaaatatttaaattataaacgaaaacagctgactgacaaaaagagttttatatattaaattcatatttaaggagtaaaataatggttaaggttagaaatgaaacagaaaaagattataaaatagtagaagaaatcaccagaaaggctttttataatttatatgttccgggctgtgctgaacattacctggttcatattatgcgcccgcacaaagattttctgcctgagctggactttgttattgaacttgacggacaggttatcggaaatattatgtatacaaaagccgaactagttgacgaaaatggagaaaaaaaggaaattctgactttcggcccggttagtatattgcctgaataccaaagaatgggatatggaaaaatactaatggaacattcgtttgaaagagcgtccgagcttggatacgatgttattgtaatattcggaaatccgggcaattatgtagcccgtggatttaaaagctgtaaaaaatataacgtctgccttgaagacgggacatttccatcagcaatgctggtgaaagaattgaagcccggcgctttggacggaagaaaatgggtttatcatgacagcgaggttatgcagcttgatgagaaggaagctcagctctttgacgacggactggaaaaaatggagaagaagtatcagccaagccaggaagaattttatattcacagccgttcttttataaagtagccttttatagaagttaagaaaagtaataatctaactaaatttattttattaaaaaataggtcactttatattttagaattaaattagtaatgcttttaatatttactttttatataaacctatgattatctattaaaactttacacgttttgctatataactgatttaatagtaataattatagtcagcaataatttttttctgtgtgaattggtttgtaacttattcagttattataggatgtgtttcatatttaaagaatacaatataaacaattcagctcaaagagacagaatatattgttcatataagcatgagcaatgacatgaaatatctgtttaatatatctccataaagatatgtaaaatgttgatagtgttgtgcatttgacataaaaagcatgattaaaatatgatgtcggtttattatatagataatatcaggttataaaaaataaggatgtatagctgcaagggaaatatattgtacaattgggagaataaatcatatgccggaattaataaaagataagtattataattacaattcgttaagcgaattagcttttcgtttaaaagacgtatatccctcgtttcaggctgataaatttgtcagcgatgtcatggacgacgattgggacgcgttagagcttaaggcccgtgtgcgccggatttctatcaatttgggggtatatctgccgtcggaatatgaacaagcaatcggcgttattgataatgttgttgcaagttatcctgacgggtataacgactattctttagtatatttccctgacttcgttgaagtctatgggcaggatgagcgccattgggatttgtcaatatctgcattagagaggtataccatatgctcaacttccgaattcgcagttaggccgtttattataaataacgaagaacgtatgatgcggcaaatggctctttgggcaaaacatgacaatgagcacgtacgaaggcttgccagcgaagggtgccggcctcagcttccatggggacaagcgctgaccagttttaaaaatgacccgtctccggttattggtattttggaacagctgaaagccgacccgtcgctgtacgtccgcaaaagtgtggccaacaacctgaatgatatatccaaaacacatcctgatttggttgtaaaaatcgcacgggattggtatggcaagaatgaatatactgattggattgttaagcatggttgcagaactctgcttaaaaaggggaacaaggatgtgctgagcgttttcgggtttgcggataccgattgtataattgtcgacggttttgaactgggtgctcaatctgtttcgattggggaaaatatgaccttttattttagaatcaaagcgaaaagcgcggttagggtgaggctggagtattgtattcactatataaaggcaaacggcaggagaaaccgcaagatattccaaatatccgagacgtcattagaggagaatcaagaaaagaaatataaaaagacccattcatttgcagatttaagcacaagaagacataatccgggaattcattcaattacgcttattgttaatggcgctgaagccggaacactggattttgacctgttgcctgctaaataactgacgtctttggagctggtgcggcggcttaaaattaaattttaaatgtttattttagatgattttataaataaaaaatagaagcggcatatcacttgaatggtatacctcttctattttttgttattgattaaattccccagctcataatccatagcgctatattaaagaagataataacggagcatgtgtctacaattgtggtaataagaggcgatgccataagagcagggtcaagcttgcacagcttggcgagtatggggagcactcctccaagcatcttagctattactactgttgctatcagacttaatcctgtgactgccgaaaggaacagcgggtcctgaccgctgtacataatataaattctcagagtgttgactgctgcaagaataagtccgacaactactgctattcttatttctttaaacattattttcataatatcttttggggttatttcgtcaagcgccaaaccgcgtattatcattgtggagctttgcgctccgcagtttcctccggtgtccataagcattggtatgaatgcgacaagtatcggaagcgctgtaaaagccgcctcataattttcaattatgcttccggttattgtggccgagagcattaggagaagcagccaaactattctgtttttggcgtgtctccaaacaggcgtcttaagatatgtttcctcaatcggctgcaaggcacccatcttttgaatatcctcagtgttctcttcctggataacgtcgatagcgtcatcgaatgttacaataccaaccagccggttttctttatcaacaaccggcagagacataaaatcgtacttgtcgaacatgttggcaacttcttctttatcgtcaagggtttcaacactgattatatttttctccatgatagtgttgataaccgtattatacggtgacagcaaaagctctttaaccgtgaccaaaccaataagtttgcggtcggtgtcagtaacgtagcatgtgtaaatcgtctctttgtctactcctgtgcggcgtattctgtcaaatgcttcagaaacagtcatgtcttttttcaggctgacatattctgtggtcattatactgccggcgctgtcttttggataccggagtatctcattaatgctgttacgcatttcagagtccgtatgtctgagtatacgctttaccacgtttgccggcatttcttcaatgatgtcaacagcgtcgtcgacaaaaagttcttcaacgacgtcgtgaagttcccgctcactgaatgcgtttatcagaagctcctgctcgtcgctgtccatttcaacaaaggtttcagccgccagctcttttgggagtattctaaataatatagggaggcgctgttcatcaatctcgccgagcagttcggcaatatcggcaggctccatagcagtaaacaagactcgtattcgtccaaattccctgctgtctaaaagctcgttcacattgtttctcatttcgtccaaattaatctgttctgccatatgaagcacctctctttccgggtctcaaaatctatcattccgtgcaggcaaagctgtctgtcattttgcaaaaaacaattataacataactcgccggtcagttcaaggtaaaatcaaccaaagatttacgcagaaatatgacttattattaatctgagtctttttttaaattattatacagttttgtgataacagaggcgtatagccgtttaaaaaagccattgtgactgtcctgcgctgagttatacggctgaagagatacaatgctctgccgattaattttttcagagatagcttcccggagtaaaacctcctgacagttaattttgctctgaacattaggtttcatatcataagtcccgtcgctttgcagaacacgggctttgaccgtgtcgctgagacatatgcggatatagtggtttattgcgtcttttatatcttgtgaatatatggggcagccaacctcaactcggttatccatatttcttgtcattatatccgctgacgcaataaacaatttttgttcctcaccttttccaaagctgtatatgcgtgagtgttcaaggaatctcccgacaatactataaactttaatgttttcggtaagccccggaatcccaggcagtatacagcagattccgcgcaccagcatagtgatatctaccccggccttactcgcctcctgaagtttgcagattatttccttatctgtcacagagttgacctttataaatatctgaccgtcttttccctttttcatctcattgtctatatagctaattatacggtctttcattgcgttgggagcaacccacaaatgcttatattcgccgtcaagattagagatggatatattattaaaaaagtttactgcgtcttcgccgatttcatggttttcggttataaatgaaaaatcggtatacagtttggctgttttttcgttgtagtttccggttcctatctgtgtgatatatttcatttctccgtttacatttttggttataagacaaacttttgaatgaattttatagtcgtctaatccatagatgatattacaaccggcctgttccagccgttctgaccaatcaatattgttttgctcgtcaaatctggcgcgaagctcaataatgactaagacttctttgccgttttccgcggcggtacataaatgttctataagtttggcgtttttagccaaacggtatatggttatttttatagacacaacctgagggtcagccgccgaccttttaatcaaatcaacaaacgggtccatgctctcgtatgggtatgacagaataatgtcgtcgttgcgttttccgctcataatattcgtatgggttatctgcggttcaaaatcaggatagcataagctgtcgttctgatcctgattaaatttgctctgaagcccaaaaacatagccgagagacaacggggattttgtggcgaatatttggttgtcagtaacgctgagttttgtacacagaagattttttgtgtattcatcaaactcattcagcgattccagccgaactactgccagacgttttctttttttcagaagctttttcatcttgcttctaaaatcctcatttatttcataagcctcatcgtttggatttatatccgcgtttctggtggcgcagaatatatttttatcactcacggtataccgctcaaaaatattttcaaagtacataaatataatgtcttctatatgtatgtacctgatttttttgcccggcatatagagtatgggcggaagcgcaggcggaattgtcacaattcccagcgaaactgatttttttctctgaacttttccgactacgcatatttgttttgaggcaataaaaggaaacgggtggtgttcatcaaccaactggggggaaagtattggctgaacataatttgtaaagtattcttttacaaatttcagttcgtcagccgtcagcgcttcaggggtgagatgaacaataccatagtttttaagattttgagaaacagaggaataaatagcgtccttttctaaatataacggccgaacggcggagtatatttttgtcagctgttcagtcggcgtcataccggttttgttgtcggttgcctttttgtcggcaatagaaaggtcgaacagacttcccacccttaccataaaaaactcgtcgagattactgacaaagatagaaacaaattttaacttctcatacagcgggacctcatcgctgacagcttcatgcaggactcgctcattaaacctaagccaagatatttctcggttttgcataaatttatattccggtttagcagagttttgactcataaattatcaccccagcctattaaaaatagtttgtcgtttaaacggattattatgtatatattatacagcgaaaaaggccagattgtaaagtaaaatgtatgtaaaatattactaaaaaagtactgattaaaaaataaaggctccggcgaaaaaccgccggaaccgcaaggcatgtatttgcttaattagcagccgcatccacagccgttgtcgcagccgcagccgctgttgtcattgccgcagcagcagcaaattaagataataagaataattatccaaagacatccgccgcctccgccaaatccgttaccgaagcatcccatctgtgtgcacctccttctgtcctcgctgtcagtgggtggtgtgcaatatgctttccgccgtgaaataaaagcatactgcacaccgccccacatgacagtcaaaattaaaatcagttatataagtacattaatgttctgtggtaagaaacaaagccgggaatttattagcagcatccgcagccattgttgtcgtttccgcagcagcagcaaattatgattatcaatatgataatccaaagacatccgccgtttcctccaaagcatccattcatttaataagcacctcctaaagtgttttcactgtatactatgacaaaattaagaattggtgaaaagtttttaaaaaagatttacataatttcaatattatgatattatttcatgtagtgaaaaggatttttgcatatatgctcttacagagccgaacattatgcgatggcgtaaaatatgaaagcggagggatcagttaatgaaaaccgatattgaaatcgctcaggagtctgttatgcagcctattgctgagattgctgaaaaacttggcatgtctgcagatgatattgagctttatggaaagtataaagcgaaactcagcgaggattatattgaaagtttagaggacaagcctgaaggaaaacttgttttggtgacagctataaaccctacgccggctggcgaaggtaaaacgactgttacggtggggctgggagaagcaatgcccaagattggtgaaaacgctgtcattgctctccgtgagccgtcaatgggtccggttatggggattaagggcggcgcagccgggggcggctatgcccaggttgttcctatggaagatataaacctgcattttaccggggatatgcatgcaataacagccgcaaataatttgctgtcggccgcaatagataatcatatccaccagggaaataagctgatgatagacctgagacagataacctggaaacgctgtcttgatatgaatgacagggctttgagggaagttattatagggcttggcggaaaaattaacggatttccgcgtcaggatggttttaatattactgttgcaagtgaaataatggcgatattatgccttgctaaaaatattgatgatttaagagaaagaattggaagaattgttataggctataatttgtcaggcgagccggtaactgcaaaacaattggaggtagaaggcgcaatgactcttctgctccatgacgctataaagccgaacctggtgcaaacccttgaaaataccccatgtctaatgcatggaggtccgtttgccaatatagcgcacggatgcaattctatcagagcaaccagagcgggacttaaactggcggattactgtataactgaagccggattcggaagcgatttgggcgctgagaagttttttgacattaaatgtcgttttgccggattgaatcctgactgtgtggtgcttgtagctactgttaaggcgcttaaatacaacagcggtcagataaagggagaagcgctgaagtatgagaatctggaagccttgagcttaggtataaacaaccttggtaagcacatagaaaatatgcgtaagtatggggttcctgtagtggttgctattaacagatttgatactgatactgacgcggagcttgattttatagaaaattactgcgctgagaaaaatgtgaaatgttcaatgtgtgaagtgtttgcaaaaggcggagacggaggagtggatctcgcaaagaaagtcgttgagactataaagtctgagccttctgagtttaagccgatttataacgttaatctgcctataaaggaaaagattgagacaatagcacgggagatatacggagcggatggagtaacttataccgccaccgctaacaggcagatattgaatctgacaaatttggggtttgataaaatgccggtgtgtatggcgaagactcagtattcgctgtctgatgacccgtcacttttggggcgtccttccgggtttgatataacaatcagagaagtaaacgtatcgagcggagccggatttatagttgcgctgaccggagcggtaatgaccatgccggggctgccgaaagttccggctgcaaataatatggatattgacagaaacggaacaattgtaggattgttttaagcaataatatataggagttgaaatcagttgtttacatcaaaggatatatatgacgttatcgttgtgggcggaggccacgctgggattgaggccgggtttgcctcggcgcgtctcggaatgaaaacatgtattttctccataagtctagacgctgttgcgaatctgccgtgtaacccaagtattggggggacggcaaaggggcaccttgtcagggagatagacgccctgggcggtgagatggggaaagtcgctgacaaaacctttatacagtccagaatgctgaataagggtaaaggtcctgcggtgcattctctgagggctcaggtggacagacggaattatcagatggagatgaagcaccgcattgagcttgagccaaatctagatttgagacaaggcgaaatagttgaggtaaagacagacgataataataacgtgaaatctgttgtcacaagaaccggcgcagagtttttgtgcaaggccgcgattgtatcaaccggaacctatttaaaatcaagaatagtaataggcgagttttctcaggagagcggaccggatggagtgtttccggcaaccgagctttcaaaaaatctgcagaatatcggagttgagctaagacgttttaagaccggtacgccgcctagaataaataggcggagcatagattttgatgagcttgaagaacagattggcgatgatgtgataattcccttttcatttgagacgaatggagagggattggtcaataaagtttcttgttatattacctataccaataaagagacgcacaggataataaatgataatcttcacagatcaccgttatacggtggcggtggaatcgttggaataggaccgaggtactgcccgtcgattgaggataaggtggtgaggttcagtgacaaaaacagacaccaattatttgttgagcctatggggctggatacagaggaaatgtatttgcagggattttccagcagtatgccggaggatgtgcagatagatatgcttcattccctgccgggctttcataacgctcaggtcatgagaaacgcatatgctatagagtatgattgtgccgacccgcttcagctttacccaacgctggagtttaaaaaaataggcgggctttatggcgcaggacagtttaacggcacatcagggtatgaggaagctgccgcccagggcttgattgcaggaataaatgcggctctaaaaattaagggaaaggagccttttgttctggaccgctcagaggcttatattggaacgctcattgacgatttggttacaaagggaaccaacgagccgtatagaatgatgacctcaaggagcgaataccgtctgcttctaagacaggataatgctgatttgcgtttaaccccttacggttatgagctgggcttgatttcatcggagagatactcaaagtttttgaccaaaaggcgtatgatagaagaggagacggcaaggcttcaaaatttgatattcccgccgtcaaaagaggtcttaaattatttggaatctgtcggaagcactccgatttcaacaggggctcgtgcggcggaactgcttaaacgtcctaatataacgtatgagggtatgaaggagatagacaggggcagacctgatataccggacgacgttgccgaacaggttgaaataagtataaaatatgagggatatataaacaggcagattaaacaggcagaacagtttagaaaacttgagtctaaaaagctgccggaggatattgattacagcaaaatagacggtctgagaatagaagccagacaaaagctcgagaagataaaaccgtcatccttaggacaggcttccagaatatcgggagtaaatccggcagatattgccgttttaatggtttatttgaaaaaatagtaaaattgaaatagaaaaataatataaaatttataaaatgtttaaaatgcggacatagtataaaaatatttttgttttataatgtgtaaagtaatttgttttaaaatatagaataaaaggagaattgttatgaagaagatattatgtgcagctgtcgctgcagttttagcagtcggagcattaactgcctgcggaaataagccgagcgagccgtcgggtgctgacgccggtaaaaattcacagcagaatgtgactactgcagaaccggcttcgtcaccgtttgtgccggaggaggttccaagccagtttaaggcgaacggcagtaatattaccgaaaaggaaggcggaggcgtttctgtgtctgttgctccgagagaaggagacgagagatataagtttgaaaatgacgatttaggatttgttgacactgagagcggagctttgctgaaaatcggcatgtcatccgaggatgtggaaaaactcataggcgctccaagaacagttgaccgtgacggttttagaaaatacagcggaatcgttataaaatatgatgataacggaaacgcttcacaaatgattgttgcagccggcaatatggaaggcgatgataatccaaatagatttgtttcaccaagaggggttaagctttcaacaacacttgatgagtttaaatcagtatatggtgatgagtacaacgaaccaagccaagcagcggaaggcgatgaatctataaaatcgtctgctatgatggctgttagatattatgcaaagaacggtgatacttttaactatttgggcggaaactatactaaagaaaataagcctgaaaatgacgctgacttgataatgcagactttcttattctcaactgagacaaaaacagtcagcgttatgtcggtaggaaacggaacagcaaactaaaaaacagccggcttgttatttgtttcaagccggcctgttttttggccgaattttttgataagaagtttttttcgtatagtgtgcgacgtatttcgacaaaataatcgaaattattcacaaatagttaattttttctttacagattattcacttaccaatgcaaaaaggtggtataatatgtattgtaacaagaaattgttacagagttaaaacataactccctcccttttaatttgtaagaccgttcccccaaacggtcttatttttttgtttataattaaaaatatgatgcaaagtttagatattattaacggaaagaaagcgattcactgcaagagagtgattcacattctttaaagacgttatttttttgagtgctgcactcttgcaaaaacaatggttggcgacataatactttctgaattcataaaaatcacctcgtataattgcagtgtcattttgctcttgaataagagctgaattacttagactttgcggattggtttaaatttcctctccgcgatatggttttattggagagcctttttgcgtttttatacgggaaactatagttttcagaaaataatttgttccgcaaagagggcggcaaaattattgagaaatatcagacattctttttttgcataaaaagtttaattccttaatgttgattttatgatgtttaccaacccttttataataaaatatttgctgtaagtttcttttattattgacgtccatatatagtatcttatttaaatacactaatttaataattaatacaaggcttgaatttttcatgtttttgtggtaaggtaatgacataaaatgatataaatttttaaatattttacataaagctgtaaagcagaaaatgtatttgatttgaatatacgtattaatgatgtattgatttctccatatggtatagttcggttaatatatttcttctgaagttcactaaaaaaacactgtatatagaaaataactataaaaaaataaattataaaagatgtggttttgcaagcatcggagggcagatgaaatctgccacgtaaggcgcgcagtcacggaaaaatttaataattatattacaatgaactattctaagtatgttcacgctacgcgtgagatggcagctcacctaacgaggtgtgcataagcacacaatacatcacaactacgtaatttattgacattgaaggctataataaaacaaattactttgtatcacacccaccatactggtggggtcacacctaccgaagttcactaaaaaacaccgtgtatagaaaaataactataagataatagattataaaaaagattggtttagcaagcatcggagggcagatgaaatctgccacgtaaggcgcgcagccgcgggaaaatttaataatattattacaatgaactattctaagtatgttcacgctacgcgtaagaaggcagctcacctaacgaggtgtgcctacgcacacccttccgaagttcactaaaaacactgtgtatagaaaaataactataaaataataaaatataaaaacgagtggtatagcaagcatcggcaggtgtgattgtgaccacacctgccgatgttcactaacaaacatccttaatttttctgtatagctttctgtagaccttccggttatactaaaataagtaattaaatatcacccactttacaggtggggtcacaatttgagtgttcaaaactgatacatataactaaatcatattttatctgttttgagatatagtccgtaccggtaaaatttaagtttcatatattatgttgatttaagaaaggatgaaataaaatggctgataaaaagattaaaggcgtactttttgatatggacggcactatgtttgacacagaaacaatgtcaatttatatttgggcggcaactgctagatattacaatataaatatttccagagagtttatgatggaatgtatgggtctcagcacgaaggctataggagaaaaatttgataaggcgttcggagatgttctgaattatgagacatttcgcagcgctaaaaataaagttatggaagagattgtggaagaggacggagtgccacacaaaaagggtctgacggaaatccttgattatattaaggaaaacgggattaaagccgctattgctacttctacatctaacgagagagccgtgtataatcttgaggagggaaaagttatacagtattttgacgaagtcataagcggagatatggtggacaagagcaaaccggaacccgatatttatttgcttgccgccaagaaactcggtctaagacctgaggagtgtatggttttagaggattcaaaaaacggcataatctctgccaggagagcaaattgtttggcggtgcttgttccggatataataccggtcgatgatgaaatgattgaagccgccgattatgtctgcgaggatctattagaagttattgatttgattaagagaataaataaataataaataccagggcttaaaaaatatagttcaattgttatgtagaatgaaaatatttaaaaaccattgtaaaaggcttgttctgacgtgaacctaaaaatcggacttttttgggtttgttcattatagtcaaaacacaatggttttttgcttatttttaataataactcttttataacacattttatctaaaaaaataagaccgtttgggggaacggtcttacaaattaaaagggagggagttatgttttaactctgtaacaattccttgttacaatacatattataccaccttttcttgtttatgggtgaataatctgtaaaaatcaaattaacagtttgtgaacataaaaaaggcgttatttaacatattatagtaattttatattcattattaaacgtttgaaacgtgacgataataatagtttaattttgatgaaatttattaaaaaaataattggttgatttatgtaatgtattaagtcatataactttcttccgaaataataagttgttatgtaatataagtgtaaagtcgacagaaaactatacagaaaaattaaggatgttttttagtgaacatcggcagggtgtgaccccaccttcaggtggggtcacagacattgtaggtttatcaatacaaagtaatttgtattacacacacttttaaaaaaagtgtggtcacagccctgccgatgcttgctaaaccacagttttatataatttatttgttatagaattattttttatacttgaaccttaacatttgtggccgcttgattgtaaactttttatatttttgaaaaatatataacaagttatcggaaatatatttattctaaaaaaattttggaaatacttcaggaataaaattttaaaaactagaagtcagacggaaataaaatatcttttaaacaagtcgtacttaaatgcgtttgccggaaaaacaaaaagtccttagtttaagcgttagcttaattctaagaactttttttatttatattatttaaagttgtttgctgttaaacaatatagaagattatgataaaactgcgccggtgcttccggaacttacgagttttgaatatcttgcaagataaccggttttaatattcggctcttttggtttccagtttttgcgtctttcctcgagttcttcatcagaaacttcaagcttaatcttatagttcggaatgtcaatggttataatatcgccttcctcaaccaacgcaattgtgcctccatcggcagcttccggagaaacatgcccaatagctgcgcctctggttgcgccggagaatcttccgtctgttataagagccacgctgttgccgagaccgcttccaacaattgcagcagtggggtagagcatttctctcattccgggtccgcccttaggaccttcgtatctgataacgattacgtcaccgggatttattttgttatcataaatagcgtttactgcgtcttcctcacagtcaaagactcttgcttttcctgaatgtttcatcatctcatcacatacagccgagcgttttactacgcatccgtcctcggctatattgcctttgagaaccgccagtccgcctgttttgctgtatggattatcttttgagcgtattacttcgttgtctgtgatttcacatccgcttatgttttcaccgacagttttgccggttaccgtaatgggagatttatcaataagacccattttgtcaagttcattcataaccgcatatacgccgccggccttgttaaggtcgagcataaaatggtttcctgccggagccaaatggcaaaggttaggagtcttttctgaaacaacgtttatggtgtcaaacggcaggtctattccgcattcgtgagcaatggccgggagatgcaaggcgctgttggtgctgcatcccaaagccatatcgacggtaagcgcgttaataaacgcttcctttgtcatgatatctcttggttttatatcatctttaacgagttccatgatttgcataccgactttttttgcgaggcggagacgctcagaaaataccgccggtatagaaccgtttcctttaagacccattccaagcacctctgtcagacagttcatactgtttgcagtgaacattcctgaacatgaaccgcaggtaggacagcagttttcctcacagactttaagttcgttttcatttatttcgcctactttaaaacggcttatagcttcaatcatggtcgaatagcttgcagactcgccgttccagtctgaacctgaaagcataggtccgccgctgacaaaaattgaaggaacattaagtctggctgcagccatcaataatccgggcacgttcttgtcacagttgggaaccataaccaggccgtcaaaaggatgagctgttgccatggcttctgtagaatcggcaattaattcacgtgttacaagtgagtatttcattccctcatggcccattgctatgccgtcgcatactgcaatagccgggaatactataggaactccgcctgctaaagcaacgccctgcttcactgcgtcaacaaccttatctatattcgtgtgtcccggaactatatcgttcttcgagcttactatgccgataagcggcttgtttatctcttcctcggtcagtcccagtgcatagagcagagaacgctgaggcgctgcgttaacgcctttttttatcctgtcacttctcattttatttcaccctcctgtatgtatttgtatattaatcttctgaccttaaattatatcttagattaaagtttatgtcaacctgaaaatatcacaaaccgacctttttattgtaggattacaatagatgtgttacaaagagaaaaaaagaatacggaaaactcataaattgtgttatagttatatcaccataatatcacataattagcttcaccgacaatgcaagcttcaggaacaaacttaacgtctatctgtactctctgaccgggatagagcatttgctcgtaaggctttggtacgtatttgggattgggtggtttaacaggcatttgtccctgtttgcggagtatgcggtaaagacctgtaatagaacgagtatagcctctttgacgaaaaaggttcattggcagcgaagtatctttaggactgctgtcaaccattatttcaaaagtatcatccatatctaacgcatataaaccaatagattttaaaggttctgctttgcaaaatcatcaaacgagtagaatttatgtgttgcataaaaatactcgttatccttacggtgtgaacgctctaccttgccgttatgtctaggtgtgtacggtcttatgagcttatgttgtattccaagttctttaagtcgcttttcaaacatagttagggtcggcttttgggagctgccaagcctcttggtaaactcttgtccgttatcggtctgaacgcactcaatagggaatttaaaggcttttacaaggtgttcgaggaataccgcagaagaatagctgctgtgctcctcaaaagcttctaaagtctgtccaatatgtcatatgtatatgaccctgtcagtattgtatttgttcctgctttttgtgtataatttttcctgtttccgtttacgtcataactatattccgcaaacagggacaaatgcctgttaaaccacccaatcccaaatacataccaaagccttacgagcaaatgctctatcccggtcagagagtacagatagacgttaagtttgttcctgaagcttgcattgtcggtagtaacggaagttagccaagaaatcctaaggtcgatgattgaggaaactcaatttcaaaagactttttcactatttgtttttcaaccatctgagaggataggttgagataagaaacttctaatctaagctgaggttttcaataagaaaataaagcaagtacggatggtttcaatgcgggctgatagctcagcaggttagagcacacgcctgataagcgtgaggtcggtggttcgagtccacttcagcccaccacttttattgctacaaagtggttttaaatttaatatcccatgggggtgtagctcagctgggagagcacctgccttgcaagcagggggtcaggagttcgattctcctcatctccaccaggaacttatagttccaaatttcaaccatctgagaggataggttgagaagatgtttgaaaattgaataaagagaagagtaaggagtaatgattagaaataattatgaaagatactttgacgtagtatatgacatccctttcggaatgttgtccccctcctaaaggcaggttactcacgcgttactcacccgtccgccgctttccatccttatcttctccccgaaggaatccgttaaaaatttctcgctcgacttgcatgtgttaggcacgccgccagcgttcgtcctgagccaggatcaaactctcgattaatattgttatatatccagactctcgtctgccaatatactcgattgtttgttagctcttatcgaatactaacgtttgcagatctctctgcttgtaaagttcgctaaaactttttttggaattgacaaagtctccactcttgcgagtttcttaccttgtgcaattgtcgtaataagtacatctaaatgtatctttattaccgctttttccttttttactctcacagtattctatctttcagcttttcttgcctcagccgaaagctttattatcttatcatattcttacccttcttgtcaatatattttttcactttacttttcacaaattctttacccattatttacttctgctttggttattttgtttgtatatagttttctatttataatgtcccgctaatattactttaaaaaataggatatgcaattttggttgcatatcctattttgtttgcttaaaaacttaaactatcttttatcacatcatcgtagttctccgaataaccaattctccaaccgctgtcgctgaggtctctgagaaactccagtcatcaatgtatcaaatccaatttatgtaacgctaataatttagacaattaatattcaagtcatttaatatgcccggcttaaatacttttttatggtcaatgttatttattgttataacatccgactgacaaatacttagcactattacttaaatatgcagttataactcttaaactattaatttattattttaatcctctaaacccgattcagcattctcagcgctttcttcattgccggtgtcactttttgcgtcgtcgcctgttttggcatcgtcaatgttatcttctacaggctcctccgcctttttcgtgtcttcttctctgctgtctgcaggttgagttttcttctcttccccgctatcagtctttttttcggtgtcagttctttgagtagatttttcctgagtagtatctttcggttttgagtctgaaccggattgtgtgtttttatcggtgttttccttgtcatttccggccgatgacttatcaccgctcgattttgtatctgaggcagctccattactgcttttcggttttacagttgcagcgggtgccgacgctggaatatcagccgaattactccttgttttaaaccaatttgaagcgtttgctgaaactatgtatatcaataaccctataataaaccctattattgcaagaccggcaacttttattataaactttcccggatgtctttttgcagaaggcttcttaactcttttaccttcataattattatcagcataaaactgctgatcctgtctgcgcgtattctttttcgttttctgatccgggttatatctataatattgctttttgacaggctgagaatgtctcctgtttcggtccccttgatattcattgccggaaattcctgtctcctctgccgcccggctgttttcaaagccgctccccctgccgtcaattttgggaatggctacagtcatatcagcattattctctaaatttgtattgacaggtcttctgtttgttctacctgcactttgtaccggtttatatgtctcagtttcagacgtttcaatatttttaacgttattatcatgcttcacatcataattattgtttaccgccggcctcaccaaagagctgccgcaatacttgcatatcttatcattgtcgcctacttgctttccgcaaaattgacaaatcatataaatacctctttctttttatgtttattaaattataacacaatattcgacctagtcaatacatgctttacataagatagcataataaaacacaaatattttgatatattttattgttctgcaatcacttatatgttataatttaaagaaaaaaatgactggagagatacttatggcacacaaaaattttaaagattttaaagaggcggtaactgaacattataataatatagaatttcctgccggggctattggagaattgtctgaaacaattgtaaatatgtcagccaaaatcactctggaagttctgcagcaatatcataaagaatttatagaaaaaagtaattaatttagaacaaaaaagtcagtccggtataaaacgggctgactttttataatttattatcttatgtctttcatatcaacatcatccatatcatcgaaggtttgattttctcctaccataccccaaatgaacgtataatttttggttccaacgcctgaatgtattgaccagcttggtgaaataacagcttcctcatttctcataacgagatgtcttgtttcctgaggttcgcccatcatatggaatacaacatcatcttctcccaattcaaaatacagatacacttccattcttctctcatgagtatggcacggcatagtattccagttgctccctacctcaagcgaggtcattcccattaccagctggcagctctgacaaacttcaggatgaatatattggtttataactctcttattacatccttcaacgcttcccaagggacgtttatttgccatttccattgtaatcttcaatgttgggtatgtatggtgagccggagccgagttcaaataaaactttgccggattcgcagggtcgtcactcttaaatgatacttctttaattcccattcctgcatataaaccatccttataggacaaatcatattcttcgccgtctagaataactgttcccgggcctccgatgttgataactccaagctctcttctctcaagaaagtaatccacgcccagctcgtgtcctgcttccaaagtcagaaccttttctgacggacatactccgccgacaattattctgtcaacatggctgtaaaccagcttcactttatcaggaataaacaagtcctgaatcaaaaaatcatttctcattctgtcagtagtgtaatgttttgcatcatcaggatgccacgggtttctaatttcaatatccatttctattcctccatttataaaaatacgccgctttctcagcgtctctttagtttcattccaattttatcatagtttcatttgatatgcaaggaataaaatgaatattttacgacagttaacattctatattatttgggaattttaatggtatattctatatattcctcactctcacgccgcttggttaccgcgtttacaccgctctgtttcataagatcaacagcttttcttatagtgttagaaaaaattcttatatctctgaaagtttgaggaaggtgccccggctttttctcttcttcattattattttcctgagacttttttagtattttttctactaaagcttctgtttttgccacattaagaccttttttagttatttcattcaaagccgacatctgctgctcctcattctcaagctttaacagcgcgcgggcatgacgttcagttaatccatattcacacaatacggctctgacttttatcggcagttttaaaatacggattttgtttgccactgtcgactgattcttcccgagcttagaggcgagctcgtcctgggtcattccatgctctgaaatcagagttaaatatgcttccgcctcctcaatataatttaggttctcacgctgtatattctcaaccagtgccaaaattgcgctgtcagtctcatcaaccctcataactattgcctgtatgtaatccattcccaaaagcttgcacgcttcaagcctgcgctgccccgcaaccagttcatactcaaacggtataacctgtcttacagttatcggctgcattaaaccataattttctattgacgcggccagctcgtttaatgagttttcatcaatttccaaccgcggctgattggggtttggttttatgctgtttattggtatggattgcgagtttccatgtgtccttatcctcttattctgagttacgtccgtcaaattaatctccatatttactctatcaatttcatgcacttcgttttcctgagaggcttctgtttcgacgcctcgttttaaatagtctaataacatttttgtcatcctttcttttgtaacatttgctatattcggctataaaaattatatcgtaatatataccttaatgcaaaaagtttaatgacaaaaatttcgacatttaattcattcttcagtctctctcaattataattaagtcgtcgccaatttttgttatcttatcccatggaatagtaacgtcgtcttctctgcccaaaacacccagaaacctgtatgagcccggaaccagaagagactttatctgaccgctgttttcatcaaattccatatcagacacaaaacccagtctttcaccatccattgcacaaattacttctttagaacgcatatcgctgaatttcattccatcaccgcctataataaaaaatcactccataatatatatgaagtgatttcaaattctatgtgataaaattattctgaatcttcttttgtctcttctgcctcttgttcaggctcagtctgatgctcaaaaccaaaaagcttttttaagcggttcatagcttcaactgtattatctttatccccaaacgctgtcaaacggaaatacccctctccattttctccaaaacctgcgccgggagttcccacaacgtttatattctccagcagataatcaaagaattcccatgacttcattccgttaggacacttcagccaaatatacggagaattcacaccgccaaaatactttatacctatctcatccatagtatcagctataacttttgcgttcgcacggtaataatttatattttccattatctgcttctgaccttcttcagtgaaaacggcctccgcacctctttgaacaatgtatggaacgccgttgaacttagtggtctgacgtcttacccacagcttgttaatctcaacaacatcactgtcaatctttaagagcttcagcttatttaccttaacctttaaatccttcggaactatagtatatccgcacctggttccggtaaatccggctgtctttgaaagtgaacagaactctattgcacatctttttgctccgtcaatttcatatatgcttcttggcagattttcatcctgaacaaaaatctcatacgcagcgtcatataaaataaccgcgtcgttttcaagagcatagtccacccacgttttaagctgctctttggtataacaagcccctgtaggattattgggcgagcacaaataaataatatccgcctttgtatttccctccggcagaggacaaaaaccattgtctgcattagcgtttaaaaattcaatttttctgccattcataatgttggtatcaacatatacgggatagaccggatcaggaatcaaaacaacattatccttatcaaataaatcagttatattaccgacatcacttttagcgccgtcgcttacaaagacctcatcaagttcaaggcgaattgtatttttcttataatagtccacaatcttttctctcagaaagtcatatccctgttccggtccgtatcctctgaatgtttcctgtgcgcccatctcatccacagctttatgaagcgcctcgataactgcaggaaccaaaggtaaggtaacgtcacctataccaagccttattatttttttatccgggttttgggctgaataatcattaacctttttagctatctctgaaaatagataactttctttaacgtttaaaaaattctcatttaatctcaatttcaacactcctttattattaattaatttctatctggctattggcggaacctcaacttctccttcacagataaatgtagccggtcccttttttattaccgtgccgtcctgcaaataagttatttttaaatttccgcctctaagcttaaccgttatttctctgtcgtgcttacagtatccgtttaaaacagctgccacaacagcagcacaagcacctgttccgcaagcccatgtttctccgcttccgcgttcccaaactctcatttgcaaagtatcctcgtcaataacctttataaattcggtattgatacgctccggaaacaattcatgattttcaaatagtggaccgactttttcaagttccaaactatcaatatcatccataaatattacagcatgggggtttcccatagacaccgccgtaatctcatattctttatccataacgctaatcggataacctataactctatcgccgtctatactgacagggatcttttgaggttcaagttccgccttgcccataccaactgtaacagataccacttcgccatctattacatcaagctctaaatctttaattcctgaattagtttcaagcgttatatcagtttttttggttaaaccattatcgtatacgtattttcctacgcatcttgtagcgtttccgcacatttcagcttccgacccgtcagcgttaaaaatacgcattttaaaatcagcggtttccgacggcataatcaatactaggccgtcgcttccgattccaaagtgcggatccgaaacaaactcagacatttttgacggattaaaaacttcctcttcaaagcagttgatgtaaatataactattacctatgccatgcatttttgtaaatttgatcattaatatccctccatataaactgcttacacatggtatattctaccacaaaacgctaataattacaagcaatagtaaaaataattttaaaaatataaaaattgtttacacaaagttcattgaatttcgtcttttattatgttagagtaaaactgtaataattttacgaggtgaagaatatggaaagttttcgaaactttatgcaggaaagatacggatttgacaaactagggctgtttattataattgcgtccattgtattatctatgttatcaaggctgttttggcttcccctcttgaattggatggctataattcttgatatagtatttatatacagatttttatctaaaaaggaatttgccagacagcgtgaaaacagaatatttcttgaaaagtttgaacaagccaaagaatttattcatagagacagaaagaactataattactacaggtgccccgtatgcaaaacaaaatttgtaactcccaaaaaccaaacctttggttacacttcaaaggttatttgcccaaaatgcaaaaatgaattttagcgcttgtaataaataaaaatagttttcataaatatagttacgtaactctttgattaatctatcccgctctttttcattttatacccctaaaaaacgccggcactcatatgtgccggcgctttcttattaattaacagcttcttttaaagctcttgctaactgggcaggacatgatgtacctctgccattgcagtcgatatcctttaaaatttcaataacctttgacgcttccattccttcaaccagcagtgatatgccctgcaaattaccattgcatccgccgacaaatgatacattactaactttaccatctactaaatcaaactttatttgacgtgaacacgtccctctggttttatatgtatactccatataatcacctccaaatatgcaattaacgaacactctgccttgaggccttgctggttccggcgtacttgccgcatttatctccccatacagccaaaacttcattgtctgatgagattacccttatgacctcacacatattagagcagccgttacactcaaaactcgttggtttaaactcaagttccagctgttcaaatccacggaacataggtgtggttatattattttcttcaatatattcttttgcaagaatagcacagcctatggctcccataacatcataatattttggtattataaccttttcgcctacctcgtcctcaaatgcctttctgattccaacattagcagcgacgccgccctggaaaataaacggtggctttaatgtctttgcgcggcccaaattgttaatataatttctcacaagcgctgtacataagccttttattatctcagcctttgagaatccatattgctgtttcgctatcatatcagactcggcaaacactgtacaccggcctgctattcttacatccttttcagcggttaatgcaagctcgccaaattgttcaataggaactccaagtctttccgcctgatgatccaaaaacgaacccgtaccggcagcgcacactgtattcatagcaaaatcagtaaccataccgtcttggaggattattatttttgagtcctgtcctccaatctcaaaaatggtttgagcgtccgggtgaaaatggagggttgccgtagcatgcgctgttatctcattttttataacatcggctccgacgagaacacctgcaagttctcttccgctgcccgtggttcctatacctagtatatcgtcatcctgacagcctatagcctctttcagttttgtcatgccttttttgacgctctccagcggctgaccgtttgccctaatatattggttaaaacaaacattataattattatccatagcgataacgtttgtactaaccgacccaatatcaatacccaaataatatttcatatataactcctataattattttgtttgatactcaggcgaagtcggtgaagtctttaaattgtccttaacctctcctacctttgtacctactcttcttgccgctgattgtgcagcgttctcaagagagtcagccacattattcaatgtgtttttctgttttgcgaaatgtttatttcttattaaatcagtaaacgcttccagtcttgtctttacatgagcctctcccatctgctcatccaaagataatgacataataggaatattaagctcctctgatacagcaggaaatttacctaagtttacaagttccggcagacatgcaaaaggcataagatgtaccacaccgtcaaaaccgcgttttgcaaaatccattacccaacccatattttctttatcatggccgccgcagtttataggcgccagcttatctgatgatttaaatattcgatgtgatttaggaaacggcagccacttcggaatcaaattatgttctacccaatcagatatgtactgaacgttttcaacttcaacgcccatagagtttaaaatttcctcaacgttcttattcacagtgggttccataataacatatatctctcccactatgccaactctaatccgtttgctttcctcaacctgacgcatcggtatgctgtcaaacattctgagcgcttttttatacgtcttattaatttcagaatatgtatcgcatttatcaaacatgttttttatttttttccatgttcttgaaaaatcgccttgattaatctcataagctctcattattttcattttcttttcaagcttatccattttcttaatgagattgtaacaaaatcttgctatacccaaaagtttgaagttgctggttccatttttgaccagcatagcgatttcataaaatgccttaaaatcattaaacatattatcaaaaacaattacttttgtatcaaatcccagctcctgcaaaactttctgatgaacatccgggtacatcccggcacggcacggaccgttgccgcctgatgaaactatcaattcggcgcccctttcagcgcactctatatatgttcccatcattaccttaaaaggaaaacagataaactcaggactatacttaacgccgagttccattgtcttttgagatggaggatcaggcattacaacttcatgacccagcttttccatcagctttttatatcctgttacacaacccatatgcggaaaagatactttcatttaatcacctcattaaccttccgaattttcctcttaatcatatctgtgaacgcttctatacgcgtctgcagatgactttcgcctgtatgttcatcaattctcagagtcataaacggaactccggaatctgcaaaatcatgctctatttcttttcccaccactgagtcaggaccacagccaaacgctgttatatgtattattccttgaacgtctaaatcctttatcataacgcttgccgcctgatataacttatccggaaatgtccaaaatataggtctggtgcactcgtctctatatttgtgaaggtctcttaaatccagcatatcaaaagttataacattaactttaagctcacgcagtttctgaattatattcatgcttatgaatggatcatatacattataaacatatccgagcaatcctatcgtagtatcaaactcaggcaatgcgaaatcagaaattttggcgccctcaaacattacctcggcggcttcatcgagcgttaaacccatattgcagtattctctgaaccgcttaaaatcctctgctgcgccctccaaagcgattcgcattttgtgagccgaaacgccaagctttttagccaccggaagatagcacttcaaagccgccgtatcctcacggtcacaatcaatttcagcaataagaagctttgcctcgggaacagtcttttcaaccaactcaggcagcccaatatacttaggacaaaaccaataattcttctctatatgcacaaatctcggacaaaatatgtagtcaacgcctttttctatcaagttaataacatgaccattatatatttttataggaaaacaaatttcagggactgtcaccgctatgcctttttgaaccagcggctttgttgaagtatcagaaataacaacctcgcatccaagcctctcaaataatgaccgccaaaacgggtaatagtactgatataataaggctcttgtaataccgattttcatataacttcctccaaattctaaaacaaaatattcagcacgtttacctccacggcctcataattataaccctaattacagccattttactccttttttcgggctttgtcaatagctttcagtctaatagattgccgaaataatcacataaaaataacatcttttttatacattttatgccggttttattttgcacattcagagtttgcatcatcaattattgtaaatactgcacttatgaaacacatttagttttttgtatatatatttataattatataaattttttattttcatatgtctatataatttatttgataagtttataaaaggcggcgggctttaagccctgccgcctttttatgagacactctatattactgaataaccagcatgtcaatcgcttggtcaatatatttagttctgataaatacctgattgcccggctcaatatcaaatggttcacctatagtaatctcatctttacttgtatcatagatataaagattcacatctgttgtaggatatgctctatagaatctgccatctgcaacattagcactttcaaccataaagtaatcaaatacttttcttacttcaccaaatacagtcataagtttgtcgttcgttatcttgtaattattgacaccaagtctgtcacgctgcgaagtacttgattcaaagtaaccgccgccgcttgttctgtaagtgtagttaaacaatactctgtatgtgtacaaatatccatttgaacccaaattgtactggataacatcacctctaactaaatccttgatatcttttttgtcgtttgccatagtccctgttggtgtaataggatcaacctgacttacatcatcatcaacctttaatgaaatatactcgccttttgaccagccgtttacttcaagaactttctcctgcttttcctcatcccaagctgttgcgaacttgtcaacaaccaatgtatcagcagtttggtctaaggttgtaggctctttatcctgaataaccattacattggctactcccctgttcaggtcatatatatctgccgtataagaaccatctgctagatcctgctttgttaatacagtataatcttcatcacggtcacgatctacaaaaggaacatcaaatatgattgtagaatcttctattgcacagttaccgataagacttctggaatatcttccttcaccgctgaaatatttaccaaagcctaaatcatcatctgcatcataattttctgtgaaatctacagccttgtataatgtcttcaacttgccttcagagttaatttcataaacaactaactgagcgtcagcaaatgctccggaattaataataaaggaagcagatctctgctgagcttcatctgttctgcctgagttatcatccttttccatcacattggtattaacctttgatgcagatacatactcatttatttttcctgtcttatcaagaatcttaaccctaaaattactttcaaaaacatcatcgccggcagcaaacttaattaaataaccgtagttaccattgtttgatgttgaagtattagtacctaagagtctgccatcataagtgatttggaaatcacttgtaaagcctgatgttatatcctttacacaataagcggatactatatactcattacctgcaagtgtaacaaccttatactctccggctgtatactgctcagttcttgttgtactgattgttccggaaacaacatttcttgatacataacctctaatatactgtccatctttacttacgcaataagttatagcatcatttttcaataattcttcaggtgtgattgttttgccatcaagagttagtcttgtatgataagaagtatcaaattttaactcaggaagtgtaactgtcatactgttttggaatataacctgatatgttgacttattatatctgtcaaacaatccgtcaaattgttcctgaatcattacagcgctggctttcgtactgctttcatgagtaacaacctttacatgaccctcttttattactgttgatacatcgctaagctcataataaggcttgccattataagaaatcagtgttgaaccatcaaacgtaagagtcttttctttatcatttgaatcagtgtaaacaatcttatcagctgttaaagaaacgatatcttttgccattatatcatattctttattcttatcttttcttggctcgcagtaagcaatataatctcttctataacctgaaacatcttccatgtaataataatttacttcatatccaagaagagattccatgtcataattatctgagaactgatagcaagtgccatcaattattacttcattttccaggtcaacttcactgcctgtcaaatatgagaagtaagttccttcaacataacctgtttcatttttaatcttatatgtttcagtaagcaaagtttttgaatcgcttactctaacatctgctgtaccgtctgctctgtaaactacagtttccatcaaatatgcttccatagcgtttctaaccatctttgccatctgcatagctgtcattgaatcagtatagctcaagctcagaccattataaatgccctgtctcaaagcaaacgttgtgtaaccgttaggaaatccgccgtttgtaatttcacaagcgtcctgatagccaagtgcacacataatcatctttgaagcttcgtttacaagaatagggtcgtttggtctaaactcagaatttccgtcaccgctcaggataccgatttctgtcaaatagcatactgatgagtatgcaaagtttgacgcgtcaatatcaacatatggtgagctgccgtatctcggatatccggctgtgtttgccttaagcatttttgcaacaattgttgcaaattccgctctagtaaccttttcgttctgccaataaccatcctccagcatttcaaaaaggcccatagaatagtcaaacttataagcgtcagcatactgaacgtcgtcattaggcattgacgcaagttctgttcctgctgccgagcttaaaacagcgtcggcagcttcttcatttgtggttgaatcttcggcaaaagctacgaaagtagacatacttaaaatcatagcagctgccagtaacattgaaattactcttttgatattactcattaacagttccctccatcttcaataatccatatatgattttagcggattgagcacggtctgcagctcccttaggatcaagcatattgtctccaacgccattaattatatctgcgcagtacattctttctattgcctcaaccgcatagtcacttatgctgctttggtctgagaaacttgcgtaaggcttattggcaggaatactaatacccaaagcattcaatgttctataagccataaccatcatatcttcacgagaaatattttcatttattccgaaagttccatcctcgtatccatttgcaactccaagatttaaagctttagctataggctcataataccattcaccctgaacaacatcactaaatggaacttcttcagccggtgatacactttcacccaaagcgcgcattaacatagaaacatattctgccctggtaacattagaagaaggtgaaaatactctgtctgccgtaccgttaacaatgtttttctcagctaaagtattgattgcgtcaacagcccactcgtaatcatttaaatcattaaaatacttgttagtattaggattctgagttactgctggagtagctgttggtgcctctgtaacactcggatcttctgttggagcaggtgtagctgtagcataattgcctccgccaccgccgccgccaggattaacgggttttacgtctatatttccggaatctgttccatcaccgttatacgctttaatacttgcaatattaacccatgaatatccatcgttacgagacttaatctgaattttaccaacattataatcatctatatcttcatcagtaaactcaccatatccatgaactagctttccatcagcatacaacttaatgttcttctgagcaaagtctacaaccactttataagttacatagtcagccgagcctttctcataataccataagccgtgaagagtctttccggtttgtgcaatatcagagtaaactgcgtctccggctattgtatcaaattgataatatttagatgaatatccggtattagaaggcagcactctatttttcttttcacttgccataggagtttttcctatactataagaaccgacttcgtctgagttaaactttaatatcggattctcaaccgttccgtcaaatctccagcttccttcgtccggcggattagtctgccacttattaactacaaactctctcgaaacaggacttgattcgctatcgaagaaaatagaaaatgctgattcccacaatgcagaatttgtagaatccttatcctcgtttacaagagaatccttatagaagttcagctgaacagtgttatgctcatcagacgcatcacttgttatctgtgatttatcacccttcttactaaaatcaccctgtctgttaagagcgtcagtttgcttctgatataaaattttcatcttaatttcataagtaaacttatcatcttgcgttacattcagcttattatctgcatttacaccatgtgagtttgtctcatccaataactgcagacaatactctccggtatccgggtcgttagccattgttacgcttccgccaagagtatacatatactcatttttcataaatgcgtcgcgttcttccttagacatcttagtaaagtcataatttaacaactgactgctcggtgtgtctgaaacaacatcagatgctgtcttaccgttgtcattaactgcaactactataaagtaatatgtctttccattttcaagatgcccaacaacttgtttgttggttctggcgtctatacctgtaagtttatgagcatatgctgtatagtcgctgccgtggtttgaggtatcgtaataaatctcataactttcatcagtagcaacgtttcctgtccaattcaatctaacttgcttcaaatatggaaccttatttgtaataacaggcttatccggaagcaaatctcctgctccctcaggcgccaccgtcgtacggaaggtcatatttttttcattagcatcgtttggatcatactctgcgacagtcacgttactattttcatctgtagcagttaccttataataatattgagtatcaggctgcaaatcaatcaatgttttagcatgataggtatgataataatctgttctttcatcataagtcaatacttcactctttgtataaacacctggctcagtaccatactcaactacacatgttgttctgtaatttgtattccagaaaatctgagcagtagaataaccaagcttatttaccttaaagttttcaattgacgccggtgtattatcagcttctaaaggttgatcgtcagccataaatgacatgtattcttcaagatatgtgtatccggattcaggattaatctctgttgccaaatacttagaagtgctccagcctctgtactctttataccagttaggaataccatctcccatgccatcccaagcgattttataagagtcaggtcttcctgcataattcttctctctataagaatccataaaatcagcgatttcagggaaatcattctttacccaatcagccgggtataaatcagcaactgttctctttacctctaaatactctttagattctcccataagagaatagcgtgtctgatcataattcgcatcagttgttgttacataacgatcccacttattgtcataaagtgtataaaccgtttgctgtcccggtgaaccacagaactcaccccaccagtcgcctatttcaaagtttgttgtatattgatatgtgctggaagcattaggatttgtattcttatttacatcagtgaaatcatcccaatgtacaggtttagtttggccagctccggctgaagcgcctttaagaacaggtccttcaccttcttttgtgttccagtcacgctgagttttatattctgaataatcattcccggttcttctttccagttcttcaaagaacggagatacttcctcagctgtaagcttattactttttgatgttccattctgcatttcaaccattgccattgtatcatacagatcccttgccggtcttgttgcacccattccattatcactttgagcatatgttgtaagcttattagatgctaaaacatttcctctaggtgcagggaaaggatagttcatatatgtcaatgttgccgcaatggcaatttttccttcattatcatatgaagcaggattgttattccattcttcataggtaacattactcaagtcataatttgttcccggcttaccattctctgaaccaaagtctaatacataatggaatgaaccggaagcgtttgttgctctttcctgtaaagtcgttttatccttaactccatagttttctttaaagtaaaccattgcgccgcctgaataaacacggccgcggccggctctgtatggagtagcatttgacatactaggaccttttcttgcccagttattataaacattcatcttggcattcttatcctgccactcataattgtaaatatcaaaaccattaccgcagttaaacagcaagttattatatgcgtctatccaatccgcatcagttatacgcggtgtacgctgagtactatctcccaagtaatttttaataaaggatgtttttgtagcaccctcattaatcataccaacataggagtgtccgcctttttcatgaggcgaattctcctttagagatttagccattattgtatttgagattgtaacatgttcgccggttacacggaaatccatatcaatcgcccattgcagagaacaatggtcaataataacttgttttgatgaaccgatactaagcgggtcagactggttaacttcgccagttttaaatacatcaccaattctaatcttcaggtttcttattataacatcatgggcacttcctacagttataccataaccttttaatgttattccaggataaggagctgtctggccagctactgtaacgttagaaagtttctcacctttgattgaaataggtcttcccaaagtagtaagatcaattactccgcctacgtcaaaaactattgttcttgcaccgctaatctgttccagtccatatgttaaagaaccttcgccatcggcatccaggttagtaacatgataaacctgacctccgcggccgcctttcgaatatgctccgtaaccttcaactccgggatatgctttaatagcgtcatcaggagtaatacttaaagtaaagtcttttgtagccgtttgtccgtttaaggttgctgtaacagttaatgttactattgccggagaagcgtttctgtcaggtcttgttacgactgctttataaccgccaagatccacaacttcattatcctcgttaacttccttattcttttctatcttaatatagttctcatcacttgaagaccagctcaatgcagaataagtacccttatcaccaagataaaagctttcttgtcttacatcgtttatatcaattccgccgattagagcgttttcagcatcatacttcgccttttcgagatcacttgtcggatcaagctcttttacagaaattgaaaagttctttgtctcagaagctgcaccaaatgtcaatgtagccgttataattacttcctgaacatcagaaccagtaaatgctggtctgttaatagtaacatgtccggttgcattatctacacttacaatactatcattggaggttgtataaacaatctttgaaccgtaatcaccttcaacaggcatattaaaatcattttctactgctgtctgcttcaaatcagacggcaataccaagttattagtatcgcctgcaactttttcctgatcagtagcaggggcattttctaaaacttttaagttaaattcacgtgttgactttgctgaacccttttcaaggttagctgtcaaaattactgccatgcttcctgcaccggtgaaatcaggacgtgtaattgaaacatatccggttgcattatcaattgtagcaatcttggtatcagatgaagtccattttatttccgagccattagctcctgatattggaacataaaaaccttctgttactttatttgcatccaaatctacaggaagacttaaagctgttttgtcggcagctacgtcttctgcgtcctgcttagcgttattgttatcaatgagtttaacattcttaacaagacaatcgccaagagacttaggatcgttcataattgtaaaaccaacaccttgcacaagtccttctgaagctgcaagattctctttgtttatactaagcttatccttagtagttataacttcaccgttttcatctttaaccgaataagtatatgtaccattttcggtatcaatgtcacatctcatagtataccatttaccggtagagtatgaaacaccggtatcaggtgttctggtattatcactccaggttgaaataccgtatggtgtgtttttgctgggatcctgatcagattttcctgaatcccaaaaataaccgcgtcctaaatacggaaaatcatctccacttactgctgtttcaacgtcgtctgtctttccatagaaaaatagaccaagtcttcccggtgtttctacataaacatcagctgacaccgcaataactccctgtgccggagtgtcaaaattgtgaattgcaaaaacgccctcatcaccggatgcggcacttccatttgaagcgccgtttttattcttctgcagtctgagagcattgccggcgctggaattatctacttttactaaagattttttctcacttccgctctttgatactgacgtaagaacccatccggggatactagtatcaccaacgttgtatccgtcaaatgtttcactgtaaattacattttcagcctcaagagtaacatcttcctcatcatactgaaaaaaaccatcagcgtcagctttgtacaaactgtcactttcaggtgccgaagtcgcagcaatatcctcgtctgctccagtatctgcatcttctgttagttctaccttattgccattttcatcaatggcataattaagaagaacctcattttcatcgttagcagtttcctgcgcctgctcagactgctgctccgcagtcacagttccggcatctttagctgattcttcagcaaaagaatacatcggagccgcctgaagcacaaacatcactgctacaagcaacgcaagaatagccttaagcttctttcttaccattttaattccccctaaaaatatataatgatttaatatttatctaattcataactgtatcaaaaaatatagatacagccaggtactatacattatatagccttttgttccaaaagtcaatgaaaagaacaattaaacacaaatttatcagaaaacttacagttattttgcttgaaagaattgtatttttgaccgtttttttcatttttgacagttatataaagctcctgttatcaaaaatcaaatactttcactcatattcgaacataataaaataataatttactaaaaatttcaaaagactgctatatattgacaaccccaagtatctgcaatatattgcttagcactataacgcctaaaaatacaggagccaaatactttacaacaattataaatactcgttttcttttaaattttgatgtcagctctatctcatcagagatagaaccaagaccaacaaaccatccaaatacgacgcacgttgcaaggcctgcaagcggaagcagcagagagtttgctatgaaatccataaagtccaaaatagaaaaacctaatattttaacaaaatccaatgcgccatatcccagcgaagccggtatacctaaaatacaggccgacgccaccacaatcaaaaccgcagggattctcttaaccttacatatatcacacagggttgatattaacacttctgctatagaaataaacgatgttaacgccgcaaaagcaactagaataaaaaaggcccctccaataacttgtccaaacggcatcttaagaaatactttaggcaaagttataaacatcaaaccggcgccttgatctaattggggtgtatcgccggccggaaatgcaaaaactgcaggtattatcatgaaggccgctaaaatcgcaattgctgtatcaaaaatttcaacattttttacacttctctcaatatccgtgtccttactcagatacgagccaaatgttatcattattcccattgcaagcgacattgaataaaacatttgccccaatgctccaactacggtttcaaatccaaaatgagaaaaatccggaattaagatatacttgacgccctcaatagctccaggtaaagtaactgaatatacagcgataactattgatattataatcaaaatcggcatcaaaacttttccggccttctctattcctcctctgactccgccgagcagaactccaagaccggccagtgaaaatattacgccatataatatcggttgatacggctgtgaaatgaaattgttaaaatacccgtctgcagccgcaaaaggaccgctgttagttatgaatgtaaccagatattttatgacccagccgcctattattgaataatatcctaatataatagtacttattataacagtcagccaacctacccatgtatatttttgactaaattttctaaatgctcccaccgggctcaagccggtttttctcccaattgcaatttccaatgtcattattgaatatccgaaggttagaactaaaatcaaatatataagcaaaaatataccgccgccatatttagcgactaagtaaggaaacctccaaaggtttcccaacccaaccgcacttcccgcggcagctaacacaaatccgattctccccgaaaaactatctctctttttcaaaacaataaccaccctttatttttataattgtattttaacacatcttaatttaaatatcaatattttaatttgatattgtaacttggtaaattttctgttatatttataataattactatttataatcgggaggaagaaatgagtaaaagagaagaagcaatgaaactgtttaaagctggatacaactgctgtcaggcagtggtaggagcgttttctgatgatatagaaatagactttaaaactgccatgctaatctcctcgtcctttggcggtggaatggggaggatgcgggaagtttgcggcactgtctcaggcatgcttatggttttagggctaaggtttggatattctaatccaaaagcatttgcggagaaaactgaacactataaacgcgtccaggaatgcgccggaaagtttaaagaaaaaaatggttctattatatgcagagaattattaggattggatctaaagagaggtgaggctgacagccatattccgtcagagcgctcaaaagaatattataaaaaacgcccatgcgttgacttagtaggagatgcggcagaaatactcgaaaaattttacattaaataaataaaaacacctggcagcaaataatgatatcaaatcatatttactgcacaggtgttttatttctatgctattatatgcttattctatttttcaatctctactttataacttttaacatagaatgatgaatcggctgaagtttgagtacctgacaggaaacctacatttgtaagcaatccattaaactctccgtcttcagaagttattgttctgcttgtgagctccttaaaatcttttgtatcaataccttggcttatataatcagttactttataactgttattttcaagaggctcaataacaactttcattgtaagccattcgtcataagcccatgtaccgctgtatgaagttggttcttcaaacgccgtatattttaaaactgtaccctttccgccaatacgtgctataactgtcgttgtttttgaaacgccatttttgtcagtatagtttactgatgaaccggctgaatttgcatacagcccccacatatctgtaccaacgtttgctcctgcatttttaacaacagctgtcataataacaggttttgttatttcaacaccattttcaggtgtccagaataactttatctgatctgtctttgcaggcgtggatttctttaatattttagctacatttacatctgtgcctgcttcctcgccgttaacaatctcaattgtactgccttcagccatagtgtctaatgccattccgccaagactatcgcctgaagcatcaattactgtcccaactgtttcgttagcaaatgtgctttcaaataaaacctctgtctccgctgccggtccttctgttggtttttcgcttggcacagcagtaggctccgcagttggaacaaccggatctgcagatggctccggagcggttgtcggtttttcaatcggcacatttgtcggttcaggttcattggtaggcgctgaggttggtaccggcggcattgtcggcgggttttccattgtagattttgtatacttaaccgcatatatgttcaatgcgccttctccgtaaatatataccggagctcccggataaacgctgaccgtaaatatcgacatagtattggcgtctacgctctttctagtctttattccgttctgctcaacaaccattacgcgcggagcgccctgactggacgcatgggcaaagtatatacttactgttccaaacttatccggagtaaaacttatggccctgcttgaattttctccatcaattgttccggctccgccgagttttaatcttcctgaatatttttcgccgtcgtcaaaagtcttattgctgacatcaatctcaatagctttgcttggactagcgtaaatagtcataccattataatttgaattacttgttatctttaattttccattggcgtcaacttcgcccaaagaactgcaattctcaactgtatattcccaggcactagtttccccggcaggatctacagttggctcaggtccattagttggtcccggtatactggttggcaaaggtgaaggtgttgctgttgccggcgcacccttaccaaatgtaacgtttacggtaacgtcactggccggcattacaaatgcgctatttttaacatcaacatttgaaccagctgaatcgacaacttccatactttgtacatcataaccactgtcaggaatcgcttcaatattaacagtttctccgttatatgctttcagagtaaatccatcggtttcagcttttccattatccgctgtaagtttaatattatcatagtaaaggtttccgcttgctgtcctcataaacttaatttgtgcaagctgaggagctctgccgtcagtaaccggtgcttctgacgtcgtcagaacaggtgttgccgaaatattgtcaggattatatgttccgtctgttccatgcagataatatgaaacagtaaatggatctgttgctccaagttctccctttatcacaactctataccactttgaagcttctaaagcggcagaaccaacctgaattcctgcctcagcctttccggctacatcatccaccgattttgttacaaagacctttgaaccaacatccatcatatggaagaatgctgagtcactgttaaactctgtagcctgacctgttgtttcatcatacggatgagctgtgttatcaagataagttctgaaagaacgacctgctgcattcgtattgtcatcataaaaatcatatgagagctcaaattctccggtcttaatgctgtccgccaatacatattgtaccgctttatccattaacttcatctttgaagaagcatttcctccaatatcagagttatcgtcaacaaccttttctgcatcaccgtcagcagagataacccacttaccgccgtttccgtcagacatcaggaaattatcggttgaattaataactgtgactttttctgctgcaagttctgcagcacccttagataattttaccgttccattttcaggctttggagcagtggcagtatattctttagcagtgctgtcaacaaacgatgctccaacagtaacatcggatgcaggcatagagaaagtgaaagtattatctgacacttttgttactttaacatcaggatcggtagtaacatcagatgctttgaacccactgttcggtttagttgtaaccgtaatttttgttcctgccttcgcagacagaataccattggaatatgttacgctctttataccaatctttgatccgtttgcccaagcatagtagcttaagttaggctctacaggtataacataagtattaatctcagctttagaaggagagtagtccttttcgaaataacttccttctgtgtcatcatataaattgaaaggtttattaggattcaagaataattctaaggataaatatcctgcctctttaggtgtgaaactaaatacgtttccgcccggatcatgctccgagaacggaaaggcaattgatggattatccaaacctttaattactttagtttgaactccgtcaacatcgacatagtaccactgtaccgcatcccaaaacgtaattgtaccgttactgtcgtccttgccatttatatttaatacagcttttccattaccaaaaatatttgtatcttctgcaactgcatctgcaggtatattgtcatctgcaagccattttaccgacttaatttcatcacttgaaatagttccattatttacaactatacttccattttcaatcgcgcttgaaatattaatattgtattgtatattgggatcaagtgtcggttcaggtgttggctttggtgtagcagttccagccggaggaggtgtgggaacatcgccataaacaacgaaaattccatagaagtttatacctgcgtcaggtttaatcgttattgtatcagcaccgccggcatgattaacttcaagcgtcggtgtagctcctccttcacaggttattgaacctattacgccagatgaatcaagtacagaatacgatctgctttctgagccgctggcagacacagcatccagtaatatcttacaagaccctgtaaccttaaatgataaagtagctgttccactcttcaaagtcttagtataagcatatccgcttccggcgaacttcttattactgtccgcaattgtagaatctttcgatactgtcaatccacctgtctcaacattagctttcataactgatccatctaaatcactaaacggcgaaaccgagaaataatatgtaggatcacccaaaggctgctcagtaggagctggggtcggctttgacggatccaatgtcggttcaggtgttgaagttggtgccggcgtagctaaaatctgctcgaaatgtgcagcaacctcaatagaacccttttgcacgtcttccggaaatacaaatgtatatgagctgtctccgttatcagttatattttttgcatctattgtcacatttttgcctgatacacttgacacataagtaatcacaggaattctgtcaacagaaaaaccatccggaggaataatatttattgtttctttttcaccgggtaaaactgttgggggaacaggcaaaattgtgccgttctgatactgacctacggtttttgtcggcatagtaatctctgaagccgcatactcagcattaacctgccatcttgcatatatacgggtatttccggttataactgtgtttttaaaatcaaatggagttttagaagtattgtcggcataccatccaacaaacgtataatgttcacgcgttacaacatcagtaggctcagccgcataacccccggtctcaacctcctgactgcttactgaaggagttcctccgtttacttcaaaagaaactatggattttccttctgcataccaccctgcatagagaaccatatttctagttacggcgtctgaatctacatcccatttcttagacgctatcaaagaatccgctgcgtcttttgatgtataccagccgtcaaaaatatatccttcacgagaaggcataactgcttttgaacctagaacactgtttttggcaacagtaactgtttttgtgcctgagccattagaaaacttaccgccgttggcgttgagcgttacatttgatgaattgctgttctgattattattgctgccgcctccgcctgaagaaccgcctccgcctaagttgccaattccgccggttgttcctgtaccgccgccgggattagatgtctgtgaaggactctcagcagctgcagttattccgtctaatatctttacaacttctgcacgcgtaataggagcggaaggcataaacgttccgtcttcatatccgtttattacacctgctccaaccaatgcggttactgaggtctttgcccattctgaaattgaatcgttatcagagaagtttaacaatcctatagaatttattttataagcacgctggaacattgtagcagcttcctcacgcgttacagcgtcatcaggtctgaacgttccgtcttcatatccaccgataattccctgagcaacgcattttctcaaatctgatacaaaccattcatcacctgaaacatcgctgaaattaatatcagcaagtgatgtgaactgttttgctgcagatataacttttgccagttccgctcttgaaatgttagcgtcaggcaggaaagttccatcctcataaccattaattacattcgcattactccacttgtcaatcactgactctgcccaatgaccgcttgtatcagaaaaagctgccgctgaaacgacagtaattccgaaagtagcaagcaccatagccatagctagaagtaatgccattgactttctcaactttttcattccaattccccctaaaatatattaaaataaacttttactatattattttaatgagcaattatgtatcattaacaaatgcaaacctgcatttgtagataaaattctcattatagacaaagtcaattatacattaatttttaatattagtcaatcaaaccaaaacaatgaggcaattattcattagtttttaataattttgtgctattagttccctaatatattacaaataatatactaaataagtcgaaatcttacataatacaaaaaatcaggacacggtttaatgcgtcctgataaatactttcactattggcttagcgccgcgtataatcttagttattattatccattatttttatgtattcatcaaagaattgttttttatacctgttaacataaacttcgtctaccataatattcacatcaggcacactgttttcttccttttgctgtataaactgcaaaaactttgggccaagaagactattagtaaaaaagtattcctttgtcttttggttgcagactataacaaacataattgatgttaattgagaccaggtcataacaaagtgtttattttctatcacagacatcctgggtgttgaaataccgcatctttcgccgaatgctttttgtgacagcttcagcaattctctgattttaggcaaatgatccgcaagctcaatacacatttcttgtttttcttcttcagttaaaataaccataaccaaacagtcctcctaaatattaggtccattactcacgcatataaaataaatttttaaatctaactgccataaatattaacgagtataattttaacacacaaaatacataatgtcaatattttataataatacgtaaatattctactattatatacaaaaagtgattctataaataaaacaaaaccgcggatattaaatacccgcggtcaaatgttttagttacttctatattaatatccttctgttacagctaaaagtttaactcttccttcagacatataaatcaatactttagccgggttaagaccttcattatactcagctataccatccataattgcttctttatcagaagttgcgtcaactatttccgtctttccgccattctcggaatatttaagaattttagctcctgagaagcttgaagcagaaatagtatactggtcttcgccgcttacatcatcattctggtctatatacttaggaatgataaccataccttcgctggaatctgaagcatatacgcttccgtaaataacacagaaatcagcgctgctccaatttgaaactctgccgcttcctacttcgatataaccttcgtcagcaggatacagacgatattcatccttaaatgtcttgaagccgtcactgtcctcgcccactctgtagatatcaccaatctgtgcattcttaactacactattagatgagagcgaagcccaatcgtcaaaagttccgttagttgaagttttagaaatcttaaagcctgaaactttatacattgtatcagatgtgtttgcatttatctgctggctcggcttatcattaaatacatatatcggcgagctgtcgtcaacttccgtagcggcgcttccgccgtatacaacaactaccttagcggaatttgtgtttgaaacatcaaatgcctcaacgctgtcataagtcttatttgtgctgaaatagctgtttgttgctttcctaaacctatccgtatcatttctttgatcctgcggcggaactacaaaaactatagagcttccgactgaaagctgaatatttccgctgctaagtttactgttagcatattttaatgaaacttctcctcgctcaagattagcaaaattataaagcttatctgactcaacagtttgtccgtcttttacatccgtgtcaggggttacagtataaagagtatctatacactggtttcctttataagtagtataagtatatttaactacctgctgcacgtctgtatgaccaacttctccggtcttctgataagacgcgccttctctcaaagcgtccaaaaagtcatatgctgtagaacagcttacaccgttaacagtggttccctttctgatatgaaaatctgttttggaattattttgagttagtattctaacctgaaaatcatctattgatgagaaagtagcttctccctcgtcataagccaaaacatatccataatattggttaactacctcattgctcttgctatacgcaaacacattacctaaaatatccagggcatatgttccattgtcaccagtctttggttcctcaagtgaaccgtcatttccattctccatccaaggagccgcgtctgagaacttatatgaattgctgccaatagacatttcatccccggaaattgttgaagatacgtttccggtagccttgtcagttaccacaacagctcttgaatactgttcgccgccattctcagcatagttgctcactgcatagcagattacattaccttcagaaatagagctgaacgaaacctttgttccatttttatctactatttcaagattagtgtctttatcaacatccaaagtcaaagttttatcagtcgctcttgatgcattatcaactatcgaagaatcacttgtagatttctttgatacataatatacctgatagtcccaaatagtaacaacgtcatacttgccgtccttatcagaatccagtactgttattgtacctacgttagggaacatatctgtagagaatctgcttgcgtccgcattggaaccataaagctttccattatatataacaatgttgtcagatgccaaattagcgtttgtaagcgatgatgtctcagttggataatacttaattgttgtattattagactcgtctttttcaatcattgaagaattgagttcaagagttgcattttcttttatctcataactgaacagcgtacggattgtatcattagctgatgttttaggatagaagaaatcaatttgatatccgagcttatttgtaaattcagctgcgttatctacagcgtatgtatgaacttcataaactgtagagttcggctcttttgcacgaatctgtatctgattctcgcggaggttaacatccgggtcgtcaagacttgtcaaatcgtttgctgaaatataccctgtatttttaatgtatcctagataatcagcgaggaatgtctttgttgttactacgccgttttcaacaagagatacctcaagtgaatcatagagcatctgcgctatacaagcacgtgaagccggcttctcagcagaacctaagttctgagcgccttttaagatacccaaagaccttgcctgagccatgaagtttgaataccacggagttgcgtcaacagaaatattttctccgtatccaagcgcgcaaacaaccatctttactgcttcttcataagcaaccttgtcattaggtctgaaagttccgtcctcataaccgttaacgataccatttttataagcggtattgatgttcgggatagaccatgaaatatcagaattctggtcagaaacatcggaaaacggtaaatctgcagatgaggacgaacctatagaaccggctcccatagttctcatcagcatagcagtaaattctgcacgggttacatcattatcaggcttaaatgttccatcatcataacctttgataatgcccaattggttaagtgctgaaacggctttttcatatgacactgttgtcggaacatcactgaaagctgcaaaaacagatacagtggacgcaaccatcaaaagcgtcaaaaccaagcacaaaactcttttaatgtttttcattttttacccctccaaataaaaatatttatttattttataaatatataaattttcataattatgcttgtccattaaattccaaacagactcgcgcacaaatatgacgcataaatgcgaagtttattttatcatgtttatcgaaaaaagtcaatagataaacaacttataaccactgaatatttatcctattattcggctaatttaagcatagcagctgaaaataatccaatataaccctcagcagtatttagtttctattttctttccattcttataaaagtatcgggctccagttcaatctcgcttttaatatatacaacgctctgaggatgattggcaacctctatctcattgccctccccgtcggtcatatactcaatcacctgagcgtgaaaatcaccgaaaggccttaaaaattctactgtattccccttaaagaatctattcttttgaataacctcagccatttttgtctctttgtcatatccggttactattcctaccatatcatagttgcgtatataagagctgctctcatagtgctgttcgctgccgccgggctttccaaaatagaagcctgttgtataatcacgatgactgacttttttcacttcatctaatagcttagtgtcaaacacataattttcatccgaattaaaataatcgtcaatagactttctatacgcttttacaattgtggcaacataaaattcagatttcaccctgccctctatcttaaaactgctcaaacctgattctatcagcttatccacatactggagcatacaaaggtctttagaattatatataaacgtacctctttcattttcatacaccggcatatattcgccaggtctctgctcttccattagaaaatacttccacctgcaaggatgcgcgcattcaccgcggttgctgtctctgccggccatatagttgctcagcaagcacctgccggaatatgatatacacatagccccatgcacgaaagcttccagttctaactcttttggtgtacgctcccgaatttcccttatctcgtccaaagacatctcccgggccaaaataacccgctttgcgcccatgttataccatgtttcagcacttttccaatttacattattcgcctgagtgctcacatgtatatccaagtccggggcaatttctttagttaacgcaaacattcctaaatcggataaaataaccgcgtcaataccgctgtctttaacacttcctaaaaactctgaatattcatttatatcagaattatgcggtatcacattagcggtcaaatatacttttttacctctttcatgagcaaatttcacaccctcaagaatatcatctgcgctgaaattatccgcggcaactctcagcgaaaattcttctcctccgatataaacagcgtcggcaccataagttaatgctattttcagcttatccaagttccctgccggcgccaacagttccggttttttaattgttttatctctattcatctaattaaccccctatctttccctagacacgcataaaggcacataatatatgtgcccgacaccctaatattaatttgtaaaccattttaaataactataatattgagcaggctgtgcgctgcctactcaatattattaataaacatcaactaatacgctacaccaaagtaatcacaaataccgtgcgctatactttcagcatagctccactgacagccatcatcggccagtttagctgcgtcggcggcagtatcaataaatgcagtttcaagaagtatcgccgtcatgctggtatttttaataactgcaaaccctgcctctttaacacctctgttagaggtaccaagagaacttgtcacatagttctgaatatatgtagctaaccttttgccatcagcattgccgtaataataatatgtttcggttcctgttccgcctcctgcattacaatggattgatacaaacaaatccgcaccaatactgttagctaaatttgacctgtaagcaaggctggctgacgtagattctgtagaacagttatcataaacagaattacgcgtcattacaacattaaaccctctctcttcaagcagaggcttaaccttttcagcgatataataggttatatcctgctctctcaaaccgtttccggtagcgcctgtatcaacgccgctgtaattgtgaccggggtctattacaacagtaagaccattattagacggaattgaaggtttatataccggttcattaataaccggttctcttgttggagccaatgtcggcataggcgtaggagccaatgccggtttggctgtcggatccggagttggaaacgctgttgggtccggtgtaggcgctaatgtaggagccggggtagcatcaaatatatcttcaccggaaatatctgtgttttccggttcttccggttccgctgtaggatatgctgaattatttgacaaatcggaagcgtcacccgacgactgatttgaatcgtccaaatcaccgccgttaataaaactcaaagagttatacaccatttgtgccacaaacgctctgttagcgtccttacccacagtcttcttcgtgttctgaagcaaaccatacttttctgccacagccacataacccgaataccaataagggccaacgcttcttaggctttcatcgccggcaccggatgaacatacgaccattttaaccacctgttcatatgtaaccggatcagccggagcgaaagaaccgtcaagcataccgtttatatatcccttttcataacaataagatatgtagttatttgcccaatacccgtcaggaacgtcagagaacggtatgtctcccgctgtgtaataagtttcattatagcctgtagcccttgacataaacgcacagaattcggcacgcgtagtctgagcctcaggagcaaagtttccatcttctctaccttgaataacacccatattgctcaacttatccaccgccgtataatatgaagcggtaataggtacgtcagagaattctctggctgatgccgttataaccggcagagcaaatattaacatcgacagtattagtactgttcctgctaatagtttgtgttttcgcataaaataatcacctcaaaaattttgccgctgaaaactcctgatactggtgcgccaatatacaaaatatttcagcaagcattccaatttcaaaaccgaaactgtgcacacagtataccacggcaggctcggaaaatcaagtaaaatcccgattttttcacaatttgttaatttgcaattcacaaaatggccaaaatatttcccacaaaattttccgtatttttatataattttatttttaaaaatcaatatattgtgttacaaaatttttgatgccaatatcttgcggtcattttttgtaacataagataaatatttctgtaacatttctgtaatatttgatttttttcaacattgccgcttttgtataaattgcacaataaaattataacaattttgagtatataaagattattttaaaggcgagccaaaaaaacttttactgcgcttataataacaagatgaatcaaatcagctgcttattatacaagcggcctaattttaaacctattatattatagtctaaatacatctgaaaccgcatgtccgggaacaaacattgcaacatgcaggatataaacaataattttagttagatactactataatgtacttaaaataaattttacagacggcaattgactttattattaataatttttattaactgcataatacttaagatataaaaatattattttttatattatctttaaaactttagtccagaatgttattttattctatataataaaagtatcaagcataaagcggctgcccagtttccatccttcaataaaatattccaataattccagacttgaaacttcttcatgtgcggctaataactgttcaaaaagatatttttcctcattcttcagtgttatgcttagtttttcttcattttctaatataacttttacatgtttttcaaattctaaattgctgacaacacgtttttcatgaggatttatatttccgtaatacaattctttcagtacactcaaacgtttcccctccaacttatgtattttaaaatttcttcacgcttgaaacttccttttattcttttttaaatttatgacttgattttgtcttttttaatggtattattttgtttagaattgagaagttatcatccggtcataataaaggattttaaagaaataggtaaataataaaatgtatctaactgtataacctctatacttgcatacagttttatcatatttttaaatcacctgctttattattttaatgtgtcaatagattatctagttgggcgtaccgataatcctaaaataaacaaatgattgcttcagcacattataatttgttaatcttctatattatattctgtaataaaaatcttaatattatatcactcttgttcttatattctgatgcttgtttatatatttaaaggatttgtgtatactaataagcaaagattgaaaacatttgcattgtttaaatgactaattcattttctttatggtgtcaacatatagttaaattgtcctatttttttaatcgttaaaaaaatatcgaaaaaatacttgaatattttatccgtttgaggtaaaataatactgctgtcggctaagaggcgtatttttattcttacttacaggcttcgctgttccgatagcagataaatctgcaaaatataaaacaatatatatctttttaggaggtactttactatgtcagtaaaagttgctattaatggttttggacgtatcggccgtctggctttcagacagatgttcggcgcggagggttatgaagttgttgctataaacgacttaacaagccctactatgctcgctcaccttttgaagtatgattcagctcagggcagatacgctctcggcgacaaggttacagccggcgagtcttctatcacagttgacggaaaagaaattgaaatttataaggaagcagacgctaacaaccttccttggggagagcttgatgtagacgttgttttggaatgcacaggcttctatacatcaaaggataaggcacaggctcatatcaatgccggcgctaagaaggtagttatttcagctcctgcaggaaatgaccttccaaccgttgtttttggtgttaacgaaggaattttgacacctgaagacaagattatttctgctgcttcatgtacaacaaactgcttggctcctatggctaaggctcttaacgactacgctcctatccaatcaggaatcatgtctacaatccacgcttacacaggcgaccaaatgattcttgacggacctcagagaaaaggcgatttaagacgtgcacgtgccggagctgttaacatagttcctaactcaacaggcgctgctaaagcaattggtcttgttattcctgaacttaacggtaagcttatcggaagcgcacagcgtgtacctgtaccaaccggttctactactatccttgtttcagtagttaagggcaaagatgttactgttgaaggtatcaacgctgcaatgaaagctgctgaatcagcatcattcggatatactgaggaacagcttgtatcttcagatattattggtattactcagggttcattatttgacgcaactcagacaatggttaaccaaatcggcgacgacctctatgaggttcagacagtatcatggtatgacaatgagaactcttacaccagccagatggttagaacaatcaaatatttctctgaacttggctaagatttctatatttattatataatttaataaaaatacgccgcctgaaaacaggcggcgtattttatataaaaacatactttataaaccgaagttatgaaatattaagtttttttattatcatattttacttaaatatattattctgtactctcagactgaaaatttacttgcttttataataaaccacataactttttactataaagaattatttacaatgttctcaattaaaatatagttataactgttcttgacagctcgatttacttttcagtattttatctgaaattcattttagttttttaaatatgggtataacacataaaagcaaacttaaacaaatcgtcaaatttactttgcgttttttccactttgcatgcttcttatatttatattttaatttctaattaaaatataaatcaatttcgtatacgctatttaaccttaaaaatattatacttcttttttctattttatttttgtcagctctatcgattcttttccggtaatataatcaatctgcagctcaagcatacataaattatcccattccttttttatttcggcctctctgtccgtcttatccccggaagaatatttgaccgccagcttttcgattgcacttcttttttctccctcatcatctaaaatccgaatcttcccaaaggcaatgatgctcttataattggtcgtatatttttccggcaccacgtcgtcttgaccgattatgcaaaaagacgctttattatttctttttacagcgtcaattttgtgtccggttttcgccgcatggaagtaaatgcttgaaccgtcatacacatagctgagcggaactgcatacgggtaatcattgtctcccgacagagccaaaacgcccgaggtaccgttatttaatatctccgatatttcttcaccggacaatgactgtttttttctgcgcatctctctaaacatatttcttctcctttatatcagtaactctataataatcttttcttaacacggcaatataacacaatgccgaggatagctacaagcccttctgttatcggcaatgtcagccatacccctataagacttgccaaaaatgacataagtagcgctataggaattataagcacgattccgcggagcaatgagattgcctgcgctggaattgctttttcaaccgctataaaaaacattgaaataactatattaagacccataaacggaaccgccgtaaaataaatttttaatccctgttctgcaatactttgcaaaagaccattattcccgctgttgaatattcctgttatcggtccggcaaatatagaaatacatgtgtaaaccaaaactgaaaccgccagcattgttaccaccgcatactttaaagcaagctttacgctgctgatattacccctgccgtatgcagaactgactatcggctgcattccctgagcgatacccgtataaatagacgcgaccacaaacgaaatatttgcaataaccccatatgccgcaactccaacatttccttgaatagccagtatgattatattaaagacaattattactatgccggaagccagctccgtaatcagagatggaatacccaacgaaaaaatcgtgcctataagctttaaatcaggtctcttaagtttaaagcgaaagcagtttttatttctgaaatgcaccgacagaatcagcatacttattatcggagcaaaaccggttgccaaaaccgcgccgaatatacccataccaaatggatatataaagatatagtcaagtataatattagaaaaacttccggcaagcattgcagacattgacagtttcggattcccgtcattgcgcacaaagcaaatcagcacatcattcattataaacgccggagcaaagtacagcagcacgctcagataagtttttgtcatatcaaacacttcattatcggcgcctaaaaggacagttattttattagaagcaaacactcccagcagcacaaaaatcactgacagaagacctgccgcgtatacagtatttgtaaatactctgtttgaatcttggtatgccttttgacctcttaaaacagaatacttagacgcgccgcctataccaaacattaaaccgcttccgtgaataaaactgtataccggaacggccaaattaagcgccgtcagaccattcgccccaactccgttagaaacgaaaaacgtatccgctaatatataaaatgataagcctatcattccgagaacattaagcgaagtatagcgaataaagtcttttaaacagtttgtctgctccatatatcttgtctccttattcataaaaagcgccagctttctatcttcaaggacttaatgatagaaagtctgacgctccgctgttttacccggcggcaaaacagcgtgattatttaatttaacatttaaccatatctcttatataatgtcaaccccatattgcatatatcttaacctgctgtttttatatataacaatttctatttttgcaatacggttagttaactatatctatatccggttcaagctgccccgttgagtataaatatataacgacagcaataaaaacgattaaagcaatgatagacaatgcgtttagtactattccccaaacgcccatccacttactcgtattccttgcagggttatactgtttcgtccccactatacccagtattaggccaacaatcggacctataaccgtattgcagagtaccaaacttataataccaattataaaactggctatagctgtccctaccggacctttttccttaacactatgaaaatcagaatatgtaccgctttggttctgagaaccctctgtcttttgagtttctccgcatattgggcatacagcggcgttatcgtccatcgcattgccgcatttggtacaatatttcatctaatcgtcactcctttatttgagtaaaccggtaatcaaatccacaaggttaaacttaacaataagcgctgcaaaaacgattgaaaccatagataacagcttaatcaaaatattaacggacggacctgaagtatccttaaacggatctccaactgtgtctccgacaaccgccgccttatgattgtcgctgccttttccgccaaagtttccggcttctatatatttctttgcattatcccaggcgcctcctgaattagccatcatgatagcaatagcaaatcccgaaaccaaagctcctgcgagcataccaacaactccgtttactccgagaaccaaacctacaactataggagcgagtataccgagagccgccggcaaaatcatctctctaagcgatgaacgtgtgcagatatcaacacatgtttcatagtccgcttccgctttgccttccatcaaaccttttatctgcttaaactgtcttcttacctcaacaactattttctgtgccgcacgtcctacagcctgcatagtaaacgcactgaacaggaacggaagcattgctcccacaaacaaaccaatcaaaacaggcggatttgtgagcgacaactgaagctgtcctccaagagcctgaattttatcagtataagaaactatcaaagccaaggctgttaaagctgcgctgccgatagcaaatcccttaccggttgctgcggtagtgttacccaaagaatccaaagcgtctgtacggtttctaacttcctcatcaaggccggccatttctgctataccgccggcattatcggcaacaggaccataagcgtctgtagccaatgttattcccaaagttgcaagcatacctacagcagatattccaacgccataaagacccaatgagaaactgctcaaatctcctgtggcaaggaaaccgccgccgcctgcggcaaagaagctgacaaggattgagatacccactataactactggaattgctgttgaattcatacctagcgctataccgtcgattattatagttgcgcttcccgtctttgatgactcagaaagcttttgggtcggcttatatgaatcagatgtataatactcagtaaagaatcctatcagcacacctgctaccagacctgatataactgcccaaaatacgcctgtattctgcggaagcagtgtaaatatcaaaactgcggctgaaatagctgaaagtatagccgaaacatatgtgcctcgtctcaaagaacccaaaagatttttctgtgtagcgccctcttttgtagaaacaaagaacgtacctataattgaagcgattattcctatagcggcaatcatcattggaacaactatgcccttaaagcccaaacctgccgctgtggcaagcgcgcctgttgatatgattgaaccgacatatgactcataaaggtcagcgcccattcctgcaacgtcgccaacgttatcacctacgttatctgcgataacagcagggttacgagggtcatcctcaggtattccggcctcaacttttccaaccaagtcagcgccgacatctgcagcctttgtaaaaataccgccgccgacacgggcaaacaaagccatagagcttgctcccataccaaacgtcagcatagccgccataatctcgttcggatcactcagaacggcttttaaaattatgaaccaaacgcttatgtccaaaagacccaagccaacaactgtaagacccataaccgtaccgcttgaaaacgctaccttcaggcctttattcaaactattttgggctccgttagcagttcttgagttagcatatgtagcaatcttcattccgataaatcctgaaagtccggagaaaaatccgccggatacaaatgcgaacggaacaaaccatgtgagaagaccaaacgctgccattacgcaaataattatcagcataacgataaagaaaataccaactgtcttgtactgtctctttaaatacgccatagcgccttttctgattttagcagaaatattcgccatttcttttgttccctcaggctgttttttaacccagaaaaatttgtacatcgcaaaagccagaccacatattgaagcggccaaaacaatccacggtgcaatgtctacaatacccattgtaaaacctcccataacaacaaaatatataagtttatttttttacaaatacataaaaaaactgggattttttctaaaatcattaagacgcagaaaaaactgcatggttaaggaaaaaactccataatatgacaaaaatttaacaaaatttcaattatattctatatatgtctataatttctttgtgtttattatacataatgaacatataattcgtcaagttttttttagtcatgtaacataattgtagtatcaaaaactaatattttatattattaccatagtctctactgtttttttgcatttttttgattttccgccgcagattgagatagtaatttataatagataaaccctctcttaaatagttgcttattttggaagccttcggcgtatatgctgaaattttaacaatatttttatatccaataagctcggctatttttttagagcgaaagacatggaaactgttggttacaaatgcagaattgttttctatacttcctccggtctttaatattttttcttttgaaaattcaaagttctcataagtgctgtgtgaatccggttcaaggataattctactttcctctacaccgttactgacaaaaaaatctttcatagcccgggcttcggttgtgtcctcgttatctccctgccctccgctgcagactattataatatcccggtttactttaaccagtttcagcgcggctgagagacgttcatataagcatcggcttggagttacgccaaacaagcggcaccccaaaactatcaaatacttaatattttttatttcttttatttcaagctcagataacttaggcataaacctaccccttaacttatatgatttgtttgttatcttaattcagataatataagtttataaaaaataacctttattattacaaatatataaaaagattgcactgcctaagcggtgcaatcttatataaccaaaatttatatttggattattccccagcggcagctccgcctgctgcagagtttccatctgctgcggagtttccgcctgatgtagaagttccggcgcctgaagcggcgcttgcagcagcctgctcgttttcaagttcctctgttgctgcctgaacatcatccaaaattgccttaactgaaaccttatcaaggttccccttgttttcgcttactttagcctgttcaacccagtaaccctgtatctcatataatccagggattctcatgattacgtggtaaccataattggtcttaaccggttcagaaatctcgttaagcttcaaagcgaatgctgcagtttcaaattcttcaaccatttcgccctttttgaaggtatatccggctgatgtttcgcttgtatcagtattatactgagtcattaactggtcaaagtcgccgcccgatttagcctgctgcgcaacattctgagctgtagctaatcctgtagcgtcgtcaacagctgttgggtcaggtgttgcggccggatctgcagctgcagggtcagttgtctcaatcaaaatgtgtttaacagacgctctgtcatcctgtgtataattctgaaggtcaacgccttccggagtaaactttgaaatatcttcttccattgccgcctgaacattctgcgccttcataacagttgtatacattctagcatattcatttgcagaagatatacccatgcttcttgctctcaggctgaatccgtcctcgccgaactgctgaacatagctgtctactgtagactgaatctgctggtcgttcttctctgtccaagcattatcgtctgtaagcagcttttcgccttgctgtcctgtaaccatatcggcaacagcatttttcattgcattttcttttatagtatcagaaagttttttgccgtcgatttcctgatcccagtcaaaactgctgaggtcgccgtctgcgctttcgccttcaatatcatagtactgagtcatagcttcagcatagatataataacctaaatctttatctgtgattttttcaccgttaaccgttgcaactgtcttgccctcagccttgccatactttggctgtgcggccgtaaagttcataatcagaaatactatcagcgctgcaaccgcaacacatccaactatgattccaaccaaagcgccgacagaaatattgacgccttttttcttttcttctgtaacttctttaatgttatcaacgctttccagcgcgtctgcttttatctctgtaatagagtcttcaagcttatctccggcttctgaaatcacttctccggcgtcattaagtttatcgcctataacttcttttgccttttgatcagcctcagaaatttcttccttgatttcagacgcggcgtcagctattttagagcttacgtcatctttcatcttttgaactttttcatcgttcaaaatgtcctttttgtcattagccatctttttttctccttttatgttatgtttaaataattttaaatctcataaaacccgggacagcccgaatacttacacagtcccaaaatattgacctgcataactacacaatcccaaaatatttttctattatacatcaaagcaagttaattttccactattgttgttaaaacttattcaaatgtttacaatttattcaaatttgccttgctttgttctgataaaaaactcatcatttcttttatctgagccaaatagttcttcccgcctttgtcagaggacagaggaacaagttttattgccaatttaggattattgggcgtcaatatcgatatttttccgggatatttgtctatcagttccaaacacggtttcatatcgggtatattttcagggtcaaattttaccgttatcctctctgagtttcctataacttcggttatattataacttgaagcgtacgccttaatcagggccacctccataaggttttcaacctccggcggaacagttccgtatctgtcttctatttcatcatacgcgtcatacagctcatcctgattttttatcgcggctatccgcttgtatgctgctatcctttgactgtgattctttatatacttatctgaaatatatgctgatacaggtaaatctatctgtgtctcggtctcatttttcgtctctatccccttaatctcagccgtcgcctcttcaagcagcctgcagtacatctcataacccacagcttccatatgcccgtgctgctgggcgcctataagatttccggtgccccttatttccaaatctctcattgctatcttaaaaccgctcccgaactcagtaaactcctttatcgccagcagccgtttttcagcctcgggagttaaactcttattccgcctgtaggtcagatatgcgtatgccagcctgtttgaacgtccgaccctgcccctcagctgatacagctgcgctaagcctaagcggtcagcgttttcaagaattattgtgtttacatttggtatatcaagccctgtttcaattatcgttgtgcagaccaggacgtcaatagttccgtctgacacgtccatcataatttgctccagctcgttctcgtgcattctgccgtgagccacggctattcttgcagacggcaccagctccgctattctgttggcgactttaaatatgccgtctattctattataaagataatacacctgaccgccgcggcccaattccttatttatagcctcccgaattacgtcctcgtcatactcaagaacataagtcgatatcggaaaccgctccgccggaggttcgtttattatgctcatatcccttattccggtcagcgacatatgaagagttctcggtatcggcgttgcggacagcgtcagcacatccacttcttttcttatctcttttattttttccttatgggcaaccccaaagcgctgttcctcgtcaatcaccaaaagtcccagcttattatatttgatatgctttcccagcagtttatgggttcctataacaacgtctatttcacccgttgccaaaccttttacaatacgcttttcttccgccgcggtacaaaaacgagacagcattgcaacgtttatcggataatccttcattctctgcttaaacgtgttaaaatgctgtgtagccaaaattgttgtcggcacgagatacgccacctgataccctgccatgaccgccttaaacgcacctctgagcgcaacctcggtctttccgtatccaacatctccgcacagcagtctgtccataggatacggcttttccatatcctctttcatctcttgtatgcttcggagctggtcgtcagtttcctcaaacgggaacttggcttcaaaatcgctctgccactcatcatccttagggaatgatattcccggagtattcgcacgcttggcgtagaggtctataagttccttagccatatcggcagcggcagcttttaccctctgtttggtacggctccattctccgccgcccagcttgttcatttttattcttgctccgtctttggcgatatgcttgtagaccatatccagctggtctgttggcacatacaaaaagtcgtcgcccttgaatcttattttgagataatcttttctgacgccatcaacattcagctgctcaatgcctatatactgaccgataccataatttcggtgaacaacatagtcacccatattcaggtcggtaaagttgtcaatcttttcgcctttaaccttgccgtagcgctttctttttttcttttcatgcccgaatatctctttatcagaaatcaccactgtctgcgtggaaggaaattcaaatccatgcgagatagaaccgtgagttataactattcctccgggcggaggaagctctgtcaaaacgtctgtgtacgcacagttaaaaccctcgttttccagctggttcagcaggttcttagcccttatctcagaaccgcccagcacaaccgtacggtattggctggatttatagaatctgagggactcatataagaattcaagcctaccctgaaaacctgccaaagacttggagccaacagcataggttctctttgccctatattcagctgaataatttgaaataccgctgaccccaacaaatctatgcgccgtcagccgttttaccgccttcttcagcggcaaaaagtattccgtatccgccttggggattattcccctttcagtcatctcagttatgtcttccgcaaaccttaccgtctcgccttcatacgcctcgcttattctgcggccgtcacaccaaaaaataattgtatcatctgccaaataatccaaaattgtgggcttttcacgatatatatatggaatatacttttctattgaagggaatctaatcccctgcttaagtctttcaatatccctgttcaacaccgaagccgatttttcggatacaggcttctcagtatcgctaagcaagctgttcagcttttttactaatttagcacgttctttatcatccggcaccagctcgcctgccggagttatcctggcctcatcacatctgtcaatcgttctttggctgtccttgtcaaaggttcttatcgagtcaacctctgtgtcaaaaaattcaattctcagcggatactgactgtaatacggaaaataatcaagtattccaccgcggacgctgaactgaccggctccctcaaccaattcctcacgcttatatcctaaactttcaaacttaccgatcagcgtctctaactcaatgtcatccccaacttttaatgttataacgttttcctgatatttcttaaacggtatagtcacactgagcaaagccgaatacgtggtcacaacataggttcgccggcctttgtttctgaacaaatagtcgagcacctcaagtctttgcttctgtatctcatggctctttacatctacatcgtaaaaaagtatatcggagtttccgtaatacagaacctccgcacctgagaaaaatctgaggtcgtcggctatttccatagcggcagcctcgttttcggcaaccaataaaatcggagcctgaaatttttcggacacacaaaaagccaggtgtgccctcacagagtccgacacacccgctacgtttataggcgtaatatttttttgtaaagcccctgccagctcctcaaagtcggcaaggtcttccataacttcataaaaaccgtttgttttcatagccaatcacatacaatccttatccgttatacatttgcatagccgtcctggcatctgtcctgattatctcctcaaccgctttcacagctcttaccgctgtgtcagtcaggatttcagtctccgccttagaaaatcttcctaaaacaaagctgcatatatcctcatgctcatccatatcatttccgcctatccccagttttaccctagggaactggtctgagttaagattgagtataatacttttcagcccattatgccctccggcgctgccgcttggtctcactctcagttttcctaaactcatagttttgtcatctgaaatgacaataatattttcatcaggtatatcataataatcggcaataggcgcaacggcctcgccgctcagattcataaaagttgtaggtttaaccgcaatcaccttttcgccgcatactatacccgttccaacctcagccctaaacttgcttgacttaaactttatattattcttggcacagaacgcgtcaacaacatcaaaaccgatattgtgtctggtattaatatattttctgcccggatttcctaatcccactatcatatacattatatttacctcaagtaaattttattattttttcttgctgtcttttctttttgccgtccactgttccttaacaacctgcttagaacgggctatagccaaagattcaggcggcacctcgtctgttatcgttgaccctgccgcagtgtatgcgccgtgccttactacaacgggagacaccaggttggtgttacagccgataaagcagtcgtcttcaataattgtacggtgcttattcacgccgtcataattcacgacaacggttccgcagccgaagttaaccctcttacccacgtcagcgtcgccaatataagtcagatgagccaccttggttccatcatctattgtagaattcttaacctccacaaagtcgcctatcttaacttcagaaccaactttggttccgggtctcagatatgcaaaaggtccgacatttgtatcagagcctatttcactgtcgatacccacagtctccaatatcttagtattattcccaaccttgcagttattcaaagatgtgttggagccgataacacagttttcaccgattacagtgtctccctcaagaactgttccgggatacaaaacggtatctcttcctaccttaacatttgttgtaacctgaactttgtcagggtcaataattgtaactccggcaagcattaaagcttcaactttgcgtcggttcaaaatctttccgacctgtgacagctggagtttatcgtttactcccatagtctgttcaagatcggtgacatacgctccgaccttttcgccttcgctcagcattatttcaattacgtcggttatatagtattctccctgggaattatcattagtaattttagacaaggattcttttagtttttgaatatcaaagaaatacatacccgagttaacctcagttattttctgctcatcctcagaagcgtctttctgctcaacgattctgacgatttcaccgttttctctgactattcttccatatccatacggctcgtcggctatcgcagtgattactgtagcggctctcatctttttgctgtggtcttcacgcaccctctttaaagtctcagcctctatcagaggcgaatccccatatagaaccataacagtgccgtctacgtcctttatgctttcaataccctgcataacagcgtggcctgttcccagctgttcatactgataggcatacttcgccctgtccccaagatatgctttaacatcttcggccttatgaccgataacgacgatattttcatcgcttccggtttcttccgcagtatccaaaacccattccacaagggcttttcctgccgcctgctgaagaggtttcgcaatatttgatttcattctctttccctcaccggccgcaaggataatgctatataatcccatttctattcctccaaacaaaattttatatcacaatttttgcattatatcataagatagtattattttcaatacctatcacaataattgatatccggtatgcctagcttaataaaatactgcctagagcatatgacagttatattataaactaaaaaaatattgcataattatcatagcagactattttcctatctcagtattcctaaatatggattttactaatctattgtgcagacaatccacgttatattttcgcctgcaatttttaattatatatctatataagcaaggaagacattataaaacgattatgtaaatatgcttttagcaaattacttttttacgtcataacaagtcgcaaaattgtaattttattacttatatacaaatttcaaaaattatgttataataaaattattaattttgcttgactgggaggatttattatgagaaagatatttccgattacagtgttagttattttactgttaatatccgtatctgtaaacgcggaaaatataacaacgataactgatctctatgatttcagcgatgtcggagaaggtaaaatcactgaagatattattctgcctaataatttgtatgttcacgcaagcggcggcagcattaccgtgaatcccagcgtcaaaaagtttgagggcagaacctacgtcaaccgggcggttctaagcccatgtaaaaatgttgaaaatcccgactgcgccgtgagtattatacctgaaaccgacagtatgctgtttgttgatatgtataacgtggcggcggaaggatcaggtctcagaagctttgaggtgaagcaggacggtatagtgttaggctcgttcatccttgacggcaaaacaatgataaccactgagcctatgcaggttaaaaaaggaatccctgtatacatatatgtcaccggaaaatatgggcttatcttttacggcgccgggctaaagtatgatacagtatctcctgacgcggttccgggaattcaaggcggcggaaaaaagaccaccggcgccaggggaaataaaaacataagcgtctatcacgttacaagtcttgcaaacgacggcccgggaacgctgcgtgacgccgtatcgcgtcccggcagaattgtcgtttttgatgtctgcggaacaattaacttgaccgaacgtttgaaaatcggcaactcaaatataacgattctgggacagactgcgccggggcagggaataaccattgccggaaccgacgttctgattgcagcagataacgtcatagtaagatatttgagagttcgccccggagacagtgttgaaggtgaatgggactgtttgggcggcgcgcacataaatgatattgtcttagaccattgcagtgtcagctgggggattgatgaacttatgtccctgtacggcggccttaatccagacggcgctgacaccggtaactatacaatttcaaactgtctcatatcagaaagcctgcgtctgtcaaaccattataaaggcgcacacggttacggagcgatatggggaggaaccaacacaagctactataataatattatagcccatcatgacagcagaaacccaagacttgccagcaatgtaatctatactgagctaaaaaataacgtaatatataattggggcggcaattcaagttacggtggtgaatcgactgctgaaaacttttatacaaaagtcaatatggtgaactcatactacaagtttggaccgagcacaaaggcaaagtataagatatttgacgtctcaggaacaggttcgcactattatataaacggtaactacgtttacggctatgaatcagaaaataacaataacggcctgaatgacaactgggcggacgaggcgctcattcataacatggctaacgcggttagggaaaatgaaccgttcgacatgggagagtataaagtgaatgaagtcagcgccgaggcggcttatgacaaagctgtaaaaagcgccggggcagtcttgccggttcgagacagcatagacgcgcgtgtggttgaggatatgaaaaatcagaccgggcgtttaatcaataaggcatatgaggtcggcggatacgttgatatgtccggcaaaagcagaatatttaaaatttccgagtcttggaaagaagcaaacaacatgggtgacgcggatgaaactgatataatcagcgagggtttatacaaaggatatacctggcttgaagcttatgtgtttgatgagattgaaaaactgtcgtataccgaatccggctggacaaattcaataacgccgaccaatcccaaaataacaatatcaaaagtatcagacggaacgcaaaccgtaaccggatatgcaaatatttatgacaacactccatatatttcaacagacaaaagaagtatagaatacggcgctgtatccgaacctgccgaaggtacaaaaataaccaaaattgaagtttacgacggtgaacaattaattgagatgtcagagggaacagaggcaataaacataacgattaatctatctaccggcactcattatataacaagccgcgcctataacgacaaaggtgaaagcacgtcgtcggacacatcaataatatatatccgcgggctgtcagacggcgagtggctatatgcagatattggcagtgtgccgtataaaggcggatacactcaaaacgaggacgggttcagcattattgcgagcggttcagtcggcggaaacagcgccggcaagatggattcgttcggttttatgtaccgtgagtttacaggggactttgatataatactggaaaccaagaatgtgcctaagtttgaaaacaatgttaagtcgggacttatggtgaggagcagcctggacagcagttctgaaatgtatcttcttgcggacagctggctgaagtatggcgaaaacataagggtttttgaaagacccgtaaaaggaacggcggttacaaactcatatatgtttgacgctgagggcaccccggtagagaatgttgactcaataacatacgatatgccgaaatatctaagaatgacaagaaagggacagcgactaacaatgtccgtctcggaaaacggaactgacttcacagataatataagacagccgtatattattgaagacacaacactgcctgaaatggtttatttgggtgttgctcaggattcatgcagttcatcaaccttgataaagtatgcggcagaattcggatttaacgtgacattatcagaagcggaaaaaaatactcagctaaaaatatatgatgaaaacgggaatgaaataaaaaataattctgttattgaaaatgactctgttttatcaaagatagttattcccgacggcgttgacacaagcaacagcgtaatatacaccgcagtatacagggacgaatgccttacagacatgcagacaggaagcgatgttaaattacctgtaagctccggagatttggtaaaggtctttgtttgggacggcaatatgcaaccgctttatacagaggaataatttattaaaacagttgtttaatttagaataaatcagacgccttgattttgtggaaaactccaaaatacacaaggtgtctgacaaattataaaaaacattttaatgaaaaaacaaaaatgggacaagccccgcaatatcgggggacttgtcccattctcttaaaaatttggtacaccttcggggattcgaaccccggacaccctgattaagagtcaggtgctctagccagctgagctaaaggtgcatatccttcgcttttcagcgaacaacatatgatattatacagcaaaccataaaattttacaatatgtaaattattctaattttatcaaatttatttataaatatttggttaaattatatatgtgtaagtataaaacatggtgttctgatttataaaatatatggggtcatataaaaattttactttataattctataatttataaaacatatataaccccataaaccaaaatgcaaaacaactcaattcacattggcggttggcagattgattgtgacccttgtgaatttgccatactcactctctatgactatagaaccgccgtggctttcaattatttctttagctatggaaagaccaaggcccgtgccgcccttttctcttgttctcgctctgtcaactctgaaaaatctgtcaaacacatgctctaagtccgcttttggtataccgtgaccgttgtcctcaacctttatatatacttcattatacatacttccggcggccacattcacatacccgcccttttcaccgtatttaatagaatttgatactatatttactatagccctctctatctgttccgggtctgcgtacatctgcggcagctcatttgccggcagatatttcagttctatatcctctatctccgcttcaagcgcaaacctgtttactatcccccgcagcatttggtcgattgaaaatacctgttttttcatttcaaatttctgtacgtcaaattttgacaaatccaaaagatttcgaactaaagcagtcattttatccgcttcggtttctattgtggacaaaaatttcttcgccatttttttatcatccatgtagccgttcaaaagtgtttcagtatgggttttaattataaataaaggcgttttcagctcatgagatacctcggcaacaaactccctccgcgcaacttcaaggttgaactgctcagtaaagtcttcaaatacgcaaacgattccggcggtcttgtcgttgtccatcttaaacggaacaaagtatatgcggatgtgtttaccgtcatatgttatatctcttatttcggtagcgtatttatccaaatacataaactccgccatacaaactccggcgttcagtttttcaaaaaacgggtcaaattctgaaactgaatcagaatcaatattaagcatatccgccgcagcaggattgatatgtatgagtttttggtcagtgtcaaacgccattataccgttggtgatatgctccaaaataacgtcgactttatgcttttcagccccaatctggcttattgttctgctcattacactgcccatatggttaaacgccttagaaagcgcacctatttcatcgttgcgccctgtttcggcaggaaggtcatatattcctcttgcaaagctgtcggcgcgcctggaaagcttccgcagaggcacggtcacagaacgggaaacatacacagccgtcaaaactgccaaagctattcctgcaagaagcgtccataacaagacccacagcagttggtttataatatcccgcaatacgtttttattatccctgatatatataatataaccatcggccgtatcagtcaccggcttaatatagtacgcatagtcaagaacatcagaagagaaattactgttgcttccctttgtgtgcttatcaagcgcattggtcaggtttggagttttttgaactttttcctgcataagcgctgacggagcaatcacttctcctccggcgccggatagaatataacatttcctgttttcgtccagctttaaaacagaagagtatgaatccagcagttttttaatctcgtattgctttacaaactctcttttcgacgagttcagaatagtttgaagagaatcaggcagtcctgactgtattgcagagtccgcatgagcaataaaagaattttcataattccgggtaacacaaaaaactgccgcaacgccgaatgcggcaataagcagtataacaacggccataaacaaagcgaccgttctgtatatcaatttgcctttaaacatcactatacctcacaaagtagtctatatattaattatatcattattataaagaccgcacaagtataattttctttgtttgacaaaaattttattattttaaaaaagcattgcaataactttgcatatgctgtataatgtacttactgtaagaggtggattctatgggaaaggctgtcaggataaaaagagtggttttattgtatttagttctgattgttttgggcattgccgccggatatcttttgcttaacggaaagcttggccttcggtgtctgtttcgggatttgaccgggttcaagtgccccggctgcggcaatacaaatggtatgctggcgctgttaaacggagattttcttgcccctgtaaaattcaacttaatgttttatcctgaagtattcactcttttatacatattgatatatctgccttacatatatataacaggaaagaatttttcaaaatacgctgccgccgcgcttgttactttggcggcggtatttataacatggggaataattagaaattttataaacttatagaagggactgtaaaacatgaaaaaatgtaaaaactgcggtcaggaatttgaagacggcgcaaacgtttgcccggtatgcggagctgcagataacggtcagtccgcaaaagtttgtcctaactgcaaaacagaagtaagtgacaattcaaatttttgcaccaactgcggcacgccaataaacggcagtgcacaaagcaataacggggacgctcagaacaacgcaggtcagaataatttcgggggtcagaactatcgccagccgccataccagccgcctatgaactatgttccgaaatcgaggctgttagcgggtcttttgggaatattcctcggcggtatcggagtacacaatttttatttgggatttactacccgtgcggttgtacaaatagtggtaactttgattacctgcggcgtaggaagtatttggggatttattgagggaattttaataatatgccatcagataaatcttgacgcttataacttcccgctcaaggatgactgctaaaaagaattgatactgcttaaggtttatggactgtttgcaattatttgtaacagttaacaaaaatagaaggtcagacaattaatgaccatcgagagaaatattttatagagcatcagactatgatgctctatttttatgcaataaaaagtctgcaaactaaaaaagtattatgtcaagtatatcataaataaattatataaaaaaatggtatttctagtgaacatcggcaggtgtgactgtgaccgcagctgaaaggcgcgtgttatcaaagttacttgttttgctatagcctgcaatgtcattaatatgtatactcaatgcaaacgtagtttgccgcgttaggtgagttatcatctgaacacgtagtgttcattatataactttactttgtatatgaccccatataatatttattattttacttataataggtgtttgaaccatttctttttctggcaagaaaaagaaacgcttcaccaaagaaaaagtgcttgctcgcttaggtcgcctacggctccaaggggcgctcgctccccgctaatttcatcttgaatctgcgcttcaagatgaaaaagccttgttactttcccgttgactttgtatactgccgtgaaaatagatattccgagttcctattttatttaactcatcaaaaaagctggtcttcgacgaacatcggtagggcggcaatgccgccgcgttaggtgagttatcatctgaacacgcagtgttcattatataactttactttgtatatgaccccatataatatgtattattttacttataataaatatttgaaccatttccttttatttaaacattcataataataacattatagttaatggcaataatttaaatactcaatgcagatgaaatctgcgtataagccgcgcagataattgatttttgcgcaaacaaaaatcggagcaagctttgcttgctccgatatggtgccggtgatcggggtcgaaccgatacggtatcactaccacaggattttgagtccagcgcgtctgccaattccaccacaccggcaaatcttaatttgacacgcgtattagtataccataataaaatataaaaatcaagactttttttagaattattttaatttttccggctttttatatctgaaattataagttttatatgcgtaatttgttcctgagtaagtccggaaacgtcaattgtcagcttattatcaaggtctaacaggtaatccgtagagacagagaaatacttggctatctttatcagcatatcgattgacggctgtatgttgtcattttcccaatttgaaacgctttgctttgtaacacagagtacttgagccagctccacctgacttattctgtgtgacttacgcaattctcttattttttcgctcaacataaattcaccgccctgtcaattattataatactataatataattgtcgcttgactaattaaaaatactatggtattgtaatagtggacaaaattaaataaaagttagtttgacaaagccaggtgaaagttatgaagaaatgtattttatgcggaagagaagctgaacagctgacagaaactaaatataatggcaggaatattaagatttgcgatatatgcagattcaattttgagaagctcaatgataaaggaaatataaaagggatatgtgaagctataaattattttaaaaaacttatgtctgaaaatcatgagtagacagacttgatttttcccggtaaacgtatataatataagaatataataatattcttgggagtgctgggttatgaaaatatctacaaagggcagatatgctttgagactaatgatagatttggcgataaacggcgaaaacggactgagttctacaaaagaaatagctgagcgtcaagatatttcacgcaaataccttgagcaaataatgacaattttgaaccgtgccggattcgttaaatctgagcgtgggtcaaacggcggatacagactaacccgccgtccgccggagtatacagtcggggaaatcctgcgtctcaccgagggcagcctggctcctgtgtcctgcttagacggtgatattaatacatgtcagaggcaaagcgcgtgcgcaacccttatggtttggaaaaaacttgatgacgctataaaaagtgttgtcgacaacacaacgcttcaggatttagtcgatgagcaaagactgttagataccagcagctacgtaatataaaaaagtttaaaaaaggtctttacaagttgaaaattttgtgttataatatctgtcgttgctgaaatatgggggtgtagctcagctgggagagcacctgccttgcaagcagggggtcaggagttcgattctcctcatctccaccaatcagcgaaagccggaatattccggctttttttgcgtctaaaattctcagttctcatacggaatcatgacggcacgttatggcacaaatttagttgtataatggctcttaacaaaatgaaaaggagctatacatatgaattatataaccgaaataaaagggtttaatgatttgctgctgagagagcggctttcctcgggacagattgcgctttggtacgctctcatgcatatagacaataaaagcggctggaaaaaatggtttacggttccggttatcactttagagctccacaccgggttgtcaaaatcagggatatacaaaaaccgtgaggttcttaaacaattggggcttatagattttaaggcttttaaagggaaggccgcaagatatacgattaattcattctgcgaagattttaaatcaataagtaataacattgctgaaaagtgtccaagcggtattgcagatagcaggcaagaaagtaatcaaggtagtaatcagaggagtagaccattatataaacaagacaaaacaaaacaagacaaaactattttaaaagaaaataataaaagaaaagataattcagataaaaatgtttatggaaaatacaaaaatgtttttttatctgatgaggaattttcagagcttaaacaattctatccaaacgattggtctgaccgtatagaaactttgtcagagggaattgagcttaagggatacaagtataaaaattatttactggcgataaagaaatgggcggaatacgaggggcagaaagctgacagaggagtagttaaatcgcccggccttaataattacagcgatggcaataagagtgattatgctgagatagagcggatattgatagagagaatgcagaacggatattaattcatgatacggcagtatattgtccagatattgtcataaaagcaatatagccgtcctcgtgcaaaggacgactatattattataatgtcgaattttgtgacaaccgtttaacggttaccttttatctttaatcagcaagcttgcttgcggagctgtctctaagtcagtcgaagagagcctactttaaattatttttataatagtatctttctcttagtttgtcaagatagtttttaaaaaatgtgaatttatgttgtaggattacaatagatgtgttacaaatagaaaaaaagaatacggaaaactcataaattgtgttatagttatatcaccataatatcacatacaagaggttgcattgatgttttcccacaaaacaggggttggtgtcaatgccgtttctgaaatattgaacgcagcatttaaaagaggtatttttgacaggacgctgtatgagaagtacaaaattctaacatcaaaagggatacaggaaagatgtatgaaaatgtgctcaagaaggaagcgttttgaagtcgagaaaaaataccttttaattagtgtacccattagccttgaaaatgtatacataaagggcgaaaatgttgacatttctgaagaaaatgtatacatttttacacaaagtaaagtaaaggaaagaaaagtaaaggaaagtaaagtaaataaaataccggccgtgcctgaagagagcaaaaaacaaaaacacaagtatggaaaatataagaatgtgttattaacagacgaagagattaaacagctgagagaaaaacttcctaatgactgggagaagtggatagagacattttcggaaggcctggagcttaagggatataagtataataatcattatctagccatactccagtgggaggagaggaacaggcggaaagaaaccggaatcagaaaaagcaagtttaataattatattgacactaacaaaactgattatgaaggtttagaaaagaaattacttgataacatgttaggggaacagcgatgataaaattcacgataagcggaaggctgccgagccttaatgattatatcaacgtatgcagacataacaaatataaggcggcggcatttaagaagcggattgatactcagataatttctgagatacggaaacagcggataggcaaagcgaaaacgccggcatacatagaatttttatgggttgagaaagacagaaggagagaccttgacaatatatactcgggtaaaaagtatatattagacgcgctgcagaccgccggagttataccaaacgacagtcagaagtacgttatgggtttggtggatatgattgcttttgacaaagcaaaccccagggtggaggttacgatttgcagtgtggatgtttaactgtatttagagaataaaaaacgcagatatttaatctgcgtcttcgccgccgggaccgtctcggcgttctctgttatcagggtaatggtccatgttagtgctaacccactggttatcggtggcggtcttttctccgttttcagactgatgtgtggggtcgggttttctcttattcatttttatcacctcaaatatagtattgccaatatttgctgaattattacgggatttatgcggaactaaaatataatatataaaaggaagaaacaaaaatgtgtaagttaaagagtgggattattttaaaagataaggtgtttgtgccgtactatgatagacatacaaaaatgttagaagaattaaaaatatccgatacattgaaaatgctaataaattatacgttcgcgcggagcttataacacctaacggagacgtctttagtccgattgatgactgaagtttttatgatgaccaggatattattccgcattagattgtagaaaattatgaaaaaacgtgtgtgattaaagcgattaagatttgggttggagagcacatatatatcaggaaatcaaatttttttgtagacaaagagaattattactttagatcttgtatgggagtgttatacggcaacagcagagttagagcctgcggcgactgtacggtttctataccttaatggtctgccaatagtattgagaatattgtgcttatggaaaagttcacctataaaaataataagacaaaaacaatatactagagtgaaaatcgaaattagtcgctgttgataatgttggagggaaaaggtgaaatctgataacggaaaaccaaaacctacattgtgcccggcaaaaataattactgcggtagccaggataagagagtgtagaataaaaaagtatggagatagtgacagctggaaagatgttgagccgcaaaggcatatggacacggcttccgggcgctttgttgtatacataaaagaccctttgggcgtagatgaagaaagcgggctgccgcacttgtggcatttggtttgcaatactgcgtttttatataaattggaagatagaagcagcaatgatagctgaagatatcaaaaagggaatttatgagaaatagatatgttattatttgtaataattgcgaatatttggatataaccaaagacgtacacaatatgagtaattataaaaaactcatatgtggaagatttacaatactaggttgttacatttaaacgcacatccgattttatatctgtgtggtagttgtaaagatgataattataaagggttcgtattttataaagattaaattcaagtattatgtagtatatcattttttattttctaaaaaatctttttgcactgttattgttgccaatgtgtcgccgagctgtgtaaatattgcggccagcagcggcagttcttcaggctctgctgattgtgaaatgcttgctgcaatcgcggttaccacagcagtaatagcaatggggtccatacaaaaatcctcctaaggtttatattgtatattatgtaattctattttacttgtgaatatgataattttatttgactgggtgctgcaaaacttatgacagacgttgtcaaatacatgcggcctaaacttgagagaaatactgaaaaggtaataactaaaaaataaacgattattttgatgcggtccagcataaaagtgagctccgaaactaaaagtaattataagttttaataaatgagcagattgcctagacgttatcagcccaaaaaatctatataaacttgaacataatttatgtatgcagacatttacttagttaaacgctataaggatttaagacataaaaaacggcgagtctttatatggcagcgctctgcctgccgatggtatgttccgagtaaacaggacaagcgattcaattatgcgtaatgctttacttttaactgaaatatcggtgcaaattgaagcgatagactaaacaatatcctggttattaaatatgacatatgatgaatggatagaaaacctgacagacaaacaaaaagaaatatttgacaaaacacgttgtaatatatagaaccaaatcagctgcaagaaacaatatgcgaggtataccgaggtttgggttaaggagaatgtacctaaaacgtttgacgagttcccaaatataaagtataataaaattagtaaatataaagagttgaagttaatatatgcagacacaggattaaaaaaaatctgtaatacatataatcttaaaatacttgaaggtaaacatggcaaacacgttttgggataatatagaaactgttataagtgatagaacagttggatacagcttaaatgaaattgacggttctgaaaacgaaatgagagctataaaaattcattatttaaaaaaggaacatatatcatgccgagaaaggagtaacagatatggatttatgtaatagattgagagaaattgcagaaaaatatacacttgataagaatttaacccttagagtgatttgtgttgaagttacatattttaccggcacaaaagaacttataggaaaatatgatggctatattcaagcattggataatgaacccgaaatagcacaattagaattgaagatacctcaatatgcaaatggtattgtatctttgttagaaacggaaattaaatcaatagatgtaataaattaagcatctttgcgaatacaaggtgcttttattattcaaaaaacgaggtgataacatgatgtcaaaagacacaacaaattaataagcaattgcaataataaattaatattgagggagccgtagaaggctcttcttttgttacgaaaagaaggcgggattatatgagcggaagttaggggaattaactgtaagatttgcgggtgacgcgtcgtcattaagttctactatatcttaggtgcggccagaattatccggtatgaatgcaatgtcacaaaaaggcgtgaaaatcatcgcagagcagacccggcaaatgggcggatatgataagatagtcgcaaagccggcctaaagtctaaagcaaaagcaaagtatattggctgaaacggaaaaagagtataagaaaaatactaaacagctgaacgaaaatataaaagggctaaacggtcagaaatcagctataggcagtcttatgacttagaaaaatctgagattcaggctttggaatctgccaatgcagggcttgataaaagcagtcaggcgtataaggatggtgtattcgccgttatatctaaatggattattgtcattttcagttttacccatatggtttccgaatgcgtcatatggataactttttagtacggcttccgtttgtagttgatattatcgaaatatgtcggttttctctgtatacataaaaaactgaaacggaactatgtcaattttttatgcgtacacttgtcaaactaatggtttcttggagggcgtaaattatacgccctccaaaacaattttagttatactctttgttatccttagtcccattacagctgacagtaaaatacttattttaatatctgatttccttccgaatttatatagtaattaaattaattttaatccattatatcatgttgttttgttaaataatcttcttctaattttatacgcgtattaattcttctataattataaagctgcgtataatcacccacctgtctcgtatgtatatacaatgcttggtttacaagatataaatattcatatgctgttatattttcttctaattgttccggatatatattcatttcatattcgcttaatgcgtttttacaatttatcattcccgtatctatgcaaaactgatagtatgggttacatacttcctgattattttcataataatactttgctatatataaatctgcgtaaaatcgtgaaccgctggatgttgataacattctgcatattgttacaaatgcttcattatatgtcatattattgtcaaagtttgcatataatttcccgtcttgttcttgtcctgttattaaattataataaaataaacttgcggctaatttatagtcatatgacaatggttctatatcagaaaattcaaattttcgtgcagtcctataatttccataataactattcattccatataaccacgcctctttttcaagttcatcttttatttgctctgctgtataaccgctagttattccaataaagtctctatcatatgtattaaaaacatatgatatttttaatgcatctcggcgagtaattaaagaagtttgattccaacgtgattcagcatttctaactatatccaaactttcaagattttctattgctgttaactcattgcctagtttgaactgctcctctgaacttaactctgagacatgcgtatcttctgcaaaaacaaatacatttgttaatattactattatcaatacataaactatttgtttcatttttttagctccttttatcttaaaataatgtcatactagataaagtgtttatttagtaatgttactcttggcatactgcctaaactttcctcgtttaattctcatgagatcgtataaggcaaatactgtattcatgcaccataattgtttccaatatatgacttatgcataaaaaactaaaacggagctatatgtatttattaaccatttaaaaaggaagtatttgatggattgttattttaaacagttaattaattttatatatttaaaaacctttcggtgttttttattccgttttagttttttatgagtatgcttgtccttttaaatatcatcttgtcaatttgttaaaattaaagtattgctgttttcctcataatctactttatatcctatggctgcacagaattctcttattgacacatatgtatcatcaatattattattaaattttctttcatatctttctattgaattttcttcaattattttcttaaatttctcttcacttaaattatcatatatactattttttattccaagataattaactaatattctatcgttttgaaacaagtatggatatatagaattatcatataaatgtccgtttatatttaaatacagatatctttttctagcctcaaaaccctctctctttaatattatatattctccataagtttttccatcatattttaaatcacatcctgccttttcaggaaacaatttattgtctgcataatgtaaattaatttggcattttaataaatttgaaattatttgtttatatgctgctacatttataggcatatttaacatttcaaattgagtttcagtttcatcaattaatttatatttcaatgcttttttatatacttcttcatctgtaaaaatataatctccgagttcttaaatacattcttctcccgaaggttctaaacatcggatgcaccaagttaaaacttcacatattttagccttatcatatggtctcacttcccagccagcattgtttttcagttctaatttaaccattccaatggaccacgaatataaaacatagtcataactataaaaatcatttttcggattatagtcaataaatggtctgcctaagtacattcctcccatatcaattaaatcttctgtcaaacctataattttcattatgttaacaatacagtcttctcttgtaaaactatcattctcataatttttatacaatatcaattgctctgttagttcatcagtatttatttctgttttgtctaatgcatatgaatttattgagaaactttgaaatatcgcgcatgttattaaaataaagaatattattttacttatattatttttcattttctatccctttcaatcattatcatactgtatttaattcaggttcaactattataaattttttaatttttctatgcaaattatttgaatagaatattactattttcattttataaattcagttaatatttcatcatttttatttccaatttttttaatcaaaacgtttataatacaactattctctttatcaggatacataaatacaggcacaatattttcatgctcatttctatatcccataataaatttatctatatttttatttgatgtaattttatagcttgttttatttatttcctttttttagataagtttttcaaattaacttttatactaaattattatataaatccatatgtttttacatcacttgctaactcttctgatatattataaaattctgcaattctttgtggtgaattattgttcaaaaacagattataaattgattttgtaataatacttgatatttttgttcttatatttaaatgcgattttgtatagttatacataacaaatctatatataaaatttaatacaactatcacaataactatagagactaaaataataaaactttaagttttctcatttacgcatgttcctcactctaacaatataaacatacgtattttatatatcttgtccatataaataataatctgtcaaattagaatttgctttttcatctgtatgctgtgtatagtatatatcgtcattatcagcagaagttattattgaagcatattctatatttccgtcttaataataactataggtaaaacttaacttcacagcttcattatacttccggtttgtaacctttgtcaacaaatataaatgtaatcgactataaatggttgattatgtgaaagttaatgacgagaaatttgtttgcggtgtatatttcgccttctaggctgttttgttgaaatgcttaagtcattttgatatactgtcatcaaagaaaaatgggagataatggtatcaaaaaatcgacaataatatttctgataactgtgtttattttatgtctgagtttatatttgaagacagagctgcctgggtgaccgatattaacggaaacagcagtaagattaataggcggggcgaagttattcttccatttgctgtgcttgcagtttatgattctcacaacatactggttggtaatgaaattaaaactcttgaaagttttgaagacggagaaactcaaacagttgtttttgatttggattccacggatacacagagaatatgtcgtctttttatttgggatagtttgcaaacaatgcgtccggtttctgttcctgtagatatagaacagaatgaataaaaatattgtgtaaaaagaatgactgttaattttattgacttatttaacagttaatatgtttattatactatggggggattaaagcatgaaaaagataattggtttgttattaactttgtcagtatctataggtattttgttatttagcgctgattccgttattgcggcgtcttataacagttctgctgctttaaattacgccgcggctcattggaatgataacgttggtctttgcgccgagtttgtttccaactgtttgagtgcgggaggatgcagtgcatggagcaggagcagcagcgctttaagaaatcagctgataaattccggacttggaaccgagtatgaattaaccttgaattcagataagtcaattacagtgtcgaactattcagggaagttagctgccggagatgttattttttattattgtcccggagcgaaatgtttaacttttatatagaacagatgttaattagacaactgctaatattaaaaagtagttgctattttagagattttaaaatttgaaatgttataaataattagagtgcagtttaacttgatgtaaaggcgaggtatatatttagtaaatttatttttaatttgctgtgtattatcagaacaaagaatttagttttataaaaattaacagaaccttagtgaatactagagttctgtttttttgcatattttatattaattgcgctatatatttgtattggttgcgattgtttttctatagaatataaaaccatctgtttgaataatatttttacaaaatatatataagtaatggttttattatggaattatataaaatgaaaaatagtatacatataaattaaatttattgcgtcacagagcagaaggctattcgccttctgcaacaattttttccaataccgcgataaggtctgacatagtattcagctgtacgtctttttcaagaatagcattctttaatgcgattggtaagctttcaaatttatcgcgtaagtttggagctacatatgacataaaaatcacctctgaagtatatagtatccaaatgtcagataaacatacagtaaataaagttcaaacaatgctttattaaaatgaaaaagctgctttgttattcaaaagagacttattcacgtgttaatatataatataaattagcataaattttagtttcagggcgttttgaatgaggagaataaaaatttttgcaggtggattgtatttttgatgatatgtataatttgctttaaaataaaatattaaaatttaaatagctaattttcagatgtattatttaatcagtcttttatgcttattaatttgacataggttcgtcatttatatcagcgtatttaaactttatggaaaaaccacaaagcattattcacgcagttattagactgcataaatttgcgtctcccaatttatcaaagtcaacatgccaaagccatgatacatcctttctattatttgcaaggccgtttatcgcagagataaaattatttttttataatcatctgcacaattgattggctcgcatagtcggaatttatattacacaaagtattatagcttgtaaaaagtttcattattttaacataaagtctccgcgataaagaatttatgtgcgataagtcacatatctttttgtacgagaaattgataaaatatctttatattttgtcaaaggatgtggagaaatggaaattttaaaattgtactttggaaaaactttatactataaaagactttattttggcataagtcaagaagcaatggctgaaaaatgctgcatatcattaaggcagtatgttgatatagaaaatggaaagagattgccgtcattcaaaagtttaattaatatcataattaaaagcggaatagatttggatgagtttattaaggagattcaagaggagggatatactccggaagattataaaaacgtaaaaaataattgataagtttatatcgttttaatgaattaaaaatatgatataaaaccatatttaaaacaaatagtttccggttttattgtatttgatttgaactataaaatttttgattaagaaactaacgaatttattatttttaaaatggtgtttaaaagtaaatataaatttgaaacagccgactgcattactgcagtcggctgttttattatatcagtagtttgaacacgaaaactgcccggcatatgttataatttatcctttatcttacatttctgttcactttacagcaatttttcattttttactgctgcgtgaaaaaatctgaagccgtataatagactgtaattataaaaatattttatttgaggttaagaaaacgtcagtatatactgaattaaaactcgtatagaattatatatgaattgtcaaaaaacgacttccattgcagtcaatatataagaaatagtgctttacaaaaaattttgtcagtgttaaaatataactatagaatataaaataatgtggtggtacatatgcatgatatatggaatccgtggcatggctgcgttaaatgcagcgagggctgtgataactgctatatgtattttttggacaaggcgcatggaaatgacggttctgagatatataagactaaaaatggctttcgatatcccattcaaaagagcagaggaggtggatataaaataaaaagcggcgagatgatacgggtttgcatgacgtcagactttttcttagaagaagcggatccgtggagagacgaggcgtgggagattattagaagcagaagcgatgttattttttatttgcttaccaaacgcccggaacgtgtggctaagcatttgccgaatgattggggagacggctgggaaaatgtgttttttaatgtaacttgtgaaaaccaaaaaagggctgatgaacgtttgcctatcctgatggagctgccgtttaagcataaaggaattatgtgcgctccgtttattggtccgttaagcattgaaaagtatttaaacggcggacaaattgagcaggttatctgcggaggagagaattacaatggagcgcgtccgtgtgattatgattgggtcaaatctctacaaaacgaatgtaaaaaatatgatgtaacgttttgttttattgagacagggacggtttttataaaggacggtaaaagatataatattcccaataaaagaatacaaagcgagatggcgtataaatcgggaatcagttatagcggaaagaaaattaagtttaatctaaagagtaggtacggttacaaaataccggagagtgaaatgtatgttccatatttcagagaagtgtgcggaacctgcggcagcagacctatttgcaacggctgcggtaactgcggcaggtgcagtcaggtaactaagtagtgcaagcgcttaaaaaggaggaatgttatagaaatagttaagtttaagacgcacttgcaaaacgtttggacaatatttattatagtaatgctgcaggacgtttttaaatggttcatccggcggaaaatatctgtcgtaagagaattaagcatactaaatattatcttcttaatttaaagttttttgtgttttagagagatgatagaagtgtgttattaaatcagctgaaaatctttaaacatttgtatgcgaaaggtattgctattgagtttatagctgtatatggtattaaatataaaaaaatatagagaaatgaggtataaaaatgaaaaattattattttaagtttttggctgtgatattatccgctgtgatggtttttggtacagtttcggttttttcggaacctcagaattcagaacctcagtttgaggaattatcgcaggattttttagactatataaatttggatgaaagtgagagaagcgggattgtcgctccattcccggcagaaatcaaacaagagcataataatgacgctgttctcagcagtgttttacctgaaagatatgacggcagggattatgagtatttacctccggtaaaaaatcaaatgagcaccggaacttgttgggctttttcagccacaacagcgcttgctgcatcaatgcagaaacagtatccgggaaatatttttgacttttcggtgcgtcatatggagaattcagaagctataaacccaaatgatttagctgaccctgattctttaaaccgttatgtggacggcggcgggtatggtttgtctccgcttggatattttatgagaggagcaggacccgttgatgaatctgaaatgccgtttcagaataatattgaagcagaaaataaggcagaccttttaataaaacccatcgctcaggtaaaagaagccgaatatatgccgcataaggaaacttttttactacccgataccactgatgaatttattgctgaagctaaatataatataatgaaatatggagccgctggatgtgcgtattatagttacgatccgttatataatatggacaaaaactcattttataataatcagcgcggtgcctatcaaaatcatgcggttactataattggttgggatgataacttttcggctgacaattttgtagcaaaaccgcctgcagacggagcttggataatacaaaacagctggggttcggattggggagacgatggatgtttttatatgtcgtattatgacgaaacgcttgatgaattaattttttatcaggattcaactccatatttggaatacgataacagatactatttagaccctgcaggatggacaagaggacttggatatcctgacaacaacggtatttcttatgggatgaatatattcgagaagcttccgggagaagaggctttaacagaggtgactataggtgtaagaggggatacggattattctatttatgtgattcctgacgctgataaaatagagccggcgtcttatgatacctcaaaagaaactccggtttgcacaggcaataccgaccatgccggatatattactgcggagcttcaaaaccctgtgattttagacggagaacgttttgcagtgatagtaaaatacagctgcccgagttatatatacagcctgccggttgaagccagaattaaggtatatactgaatactatcatttagctgctgagccgggaacaagctatatatccgctgagggtaaagactggacagaaataagcaacgagaaatatgattatgccaattgttcgataaaggcttttacaaaggatatcacgccaaagacagaagtaacgtttgagactttggacccaaagggaattatgagcgtgtatgacaaagacggcagaaaagccgccaagaaagccgacggcagttttgctttgccgaacggtaattatacttatgtccagagtacatatcattgtaaagatgttaccggaactttttccgttagcggggaggaaagtataactgttaaagtcgaaggaaaaatggagcccggagactattctccggaattaattaaaagaacttatgagtatgaaaaagaactgaacagcgatgggtccctttcagtaggatttgatttggggaaaggaactttagccgcagaaaacgctgttgcgtgtgacgaggggattccccttgaactgggtgcagactataatatctcagggaacagtattgttttgacgcctgaatatttaaatgcagtacgcaattatatgatgcctgacggcggttcttgggtattagaaattaagtttgatgatgataaattaacagaatatcagtttgttataaagtttgaatccttaacggtggaaaatgttgctgatgaactgataaacgaattgagaaaggcaaaacccggcgctttatctgcggatttggttgattcgcttcctaaatttatacaagataattttacatttctttttaatggagatcttgaagttgagtcgtctaagaattataatttcgtgacctgtgatgttatagttatgtcaaatgacggtacatataaacgtctcgtatatgataatcagatgttatataaagttgtcatggcagtagaaaaatcgcatacgttaactgtgcgcggatatggagatgtttcgggtacgctgtttatttgtcaatatgacggcagcggtttattgattgactctaagccgtatactttggaacttaaaaatggtgatgagctggattttccatatgaaattgttgaaggaagcgttagaagggaattctttttcttcgatatgaatacgcttgagcctttggcaaaatattaggttttaaaatgtgaaaggaagcaagatgcagataaacagactgtttgagataatttatattctgctcaataaagaaaccgtgacttcgaaagagctggctgaaaggtttgaggtttcagccagaactatatacagagatatagatattctttccgcggccggtatacctatttatactgagaagggcagaaacggcggtatttctctgcttcacgattttgttctcaataagacggttctgacgcaggaggagagaaacgatattctgtcttctcttaaagctgtcagcgctgtgggggcggaccgaactgatacagcgcttaaaaaacttggcgctatgtttggcggaggagcggattcctggctggaaatagatttttcgtcttgggcggattataagaaaactgccgagacgtttgaaataatcaagtcggtcattattaataaacaggtgatagagtttgagtatttcagcggttcaggcgagagaacaaaacgtgaggcagagcctttaaaactatgttttaaaggtgggtcatggtatctatatgctttctgcaggtttagaaatgattttagattttttaaactgacccgcataataaacgtgaaaataaaagaagaaattttcagcaggagtgttcccaggaagattttcacagaaaaaaatagtttcaacgatgaatttatacggttgaagatgagaatatcgaaaaagctggcttacagagtttatgatgaattcgacgaatattatgcggataaggacggcagtttcattgcctatataatgtgtccaaaggaccagtggctttattactatatctcaacttttgggaaagactgcgaggttttagagcctaaagaggttcgcagcgggtataagtctgaaatagaaaaaatattaaaaatctataaacaagaataataagttgtataaattaatagattaaattagtatatagttggcgtgttatatggctgtatggatgaatatgaggcaatgtatatgaagaaaaacaaacgtattattgtaacagttttattaatagttttgctctctgctgttatagcggccgcaggcaaggaatgctatgattttgagcgcagagcatgtttcagccggctgaccggatacacagaagaaattggcagtgatataaagagaacgcttgagagtgacagaaatattttaaacggcgctgcaaacataataaaacagtatgatatttcagagcgtgatgagatagtaaaaatcctttcttcctttgagggaatgggtttaatttcgcgtttggagcttttgcttccgggcgatatgatgcttacgggtgacggagaaactttggatatgtcaggagtgctttcttatcaggaggaactgtcaaagggtgtgcatatttctaaacgcgaaaaagattatcaaaatcagtataattatatattaagacaatgtgttcctattgagcgaaacggtgaaaatgaagccattattattggtgtggttgaccttaataagcttcctgtatattttcctgccgcagattatggcaatgagactcagatttatttggttgaaagggagacgggcaattttttgcaggacacacagcataaaacgctggggaatatgtatgggttcggcgatagaaagaccaaaaaaggttacagcagcgaccaatttgtttcggatattgccgccggaaaatccagctccgcgatttttttgtctcaaacatcaggcgagtatctttattcttacgtctcacctgtaggcatacaagattggatgattttgcttagcatcagtgaggatgaggtgttttctcaggcaaacgtgatgatgaggttcttcttcggattagctctgtcgtttttcctcattgttttaatttattttatatggatgattaaggatgtcaggcgtgaaaatttaaagatggatgaacagctcaagaacgttcagtatatgcttgaagttgaaaaggaattgtttgacgcgcatttgcatcctgagaattttaagagagcacttaaaaaggtttctgattatttaactgcagaagcggcgtttttttggataatcaacgggcattccgatattaagtattgttataacggttcgggcattgtttttgatatagatgaagataatgaaatgtctgaattgttcccgggactttttaatattcttcttgaaaggggcggcatattaagctatgatatgaaggctgttgctgaggaatttcctgtcggaggaaagaacttggctcagtttaatattaacaatcttatgcttattccggtatcaggttcaggaggtgaactgacaataatatttggcgcctgcaatatgaagcgccgttgggaaagcgatgttccgctgagacaggtttctctaagcttttttatggctttaaaccattatgaagctcattatgagctggagagacttggaagaatagacaacttgacagggcttttgaacagaaacagtttcagcgccgctttggaaagattatcgagtaataaaccaaagtcgtttggctgtgtttatattgatgttaacggtcttcatgaaataaacaattgccttggtcatcaagccggagacgatatgctgaaagctgtggcggatgcattaaagcgaaattttggcgatgacggcgtttatcggattggcggagacgagttcgtaattttaagcgaaaataagactgagactgtgatttcagagaaaattaaagctgtaagatacgaacttaaaaatcaaggttatgcgttgtcggtgggaacggcctggaaagaatcttttaacagatacgatttgataattaatgaagcagaagcaaaaatgagagatgataaaagaaagttttattgtgaaggaggagcggtcagaagttcacgcagtttggataagcaggttgaaaagatggttttggaaaaacaggacgctgacgcgtttctctcggttttagctcctgaattcaaaggggtatattttgtcgatttagacagggatacagtcagacatctctatataccgttttattttgaaaaaattttaaaagagacaggtgatgtattcagcaaagccctgctgctatatgctgctagaaatgtaagacctaaatatatagagtattttaaaagcgtgtgtgattataacggtttaaaaatgaaattgagcgataatataacgcctgaatttttatatcaaaaaaaggacggctcctggctgaagcttagaatattaaaatttaagaattacggagagaacagccatgagactttgtggatatttacggattcggaatccgaaatacaaaattaaaacgtttaataaataatcgtcagattataaggcgcctttcacggcgcctttttgttataacaacattccgttcatggataagactgaccaatatttttagattaaggggtataaattaattaaaaatgattcagttcaaagaaacggattatggatttttatattattgagtatatcaaagcaaatgaatgtcatagaattatgtgtcaatactgagcggcaattttcatcaggatttctaacgtgtttacgggaaataaaaatttgatttgttttgtcaaataaaagataagcccaggttggttaatatattattttataaaatatgacatgctgttgtcatattaatagtattataatagcattatcaaaacttaggaggtaataaaatgaaatatgaaatcgttgagttggaacccaaaaccgtggttgggataagcgcagtgacatccaataacgaccctgaaatgcagaaaaaaataggtgacttgtggacaaggctgtatccgggcggagaaatagccaagataaaaaacagagctaacagtttcgctataggtctttattcagactaccagggtgataattattgtgtgacggcaggctgtgaggtaactgaagcggataatgacgatatggtcataaaaaccattcccggaggaaaatacgcaaaattttctgtgcgcggaaatatggttgacgctgttgccgaggcgtgggaagaaatatggaaaatgaatcttgaaagaagttataaggcggattttgaggaatatcttaatgaagattttgaaaatgcagaaataaatctttatattagcttataaaatttgttttaccgtccgccggattaatttaaaagattttcccggcgggcgataattaaaatggcttgtttattaattatatacgagcgaatcatcacatttgttttctcggctgtccgcccatttctcaaattcgtttaaaggcagaggttttgaaaaaatatatccctgaaccatatcgcaattgacgcttttgagaaaatttaactgttcagaagtttcaataccttccgcaacaacgtgtatgttcagccttttggcaaggtctataaaacttatgattatattttggctctttgagtttgttatatcctcaaaaaattttcggtccagtttgattgcgtcgacattaaattcttttagaagtcccagtgaagaaaaaccaactccgaaatcatccaatgaacatagaaagccataactatgcatttggtttattgcgttttttaccagttctatttgttggttatcaaaaaatattgattctgttaattcaagttcgattactccatccggaatgttatacttgtttttcagctcaataaacggacgcagataatttaaatttctaaaatgtacccttgaaagattaacagatatggtaaaaagtttttttccgctgtctattctttgcttttggtattcacataccttttcaaatacataaaggtccagctgtattatgtttccgtttctttcaaacagaggaataaaatctgacggatagataatcccgcggtcgggatgaaaccaccttacaagggcctcagcgccgcctgtttcaccgtttttaaggtttattttgggctgaatataaacgtgaaaatcattgttttttattgagtcgtcaaacagactgcaaagtttctgttccataatcattttatttgttatctcagagttataaaatgaacaatctgaaattttattttgaagctgacaggcagtgcgggcgcggtcttgaatcattcttatgtttaagccgggctcctccactatatatgcgccttgtgagatttttatattatgtggaatatcagagttttgcgcgtatgaattaatatcggttatcatttcatcaatgcgtttttgtataacgtttttgtcaaattcttttaagcataagaaaaagtggtctgcttcactccgcgttatcatctcgtcttctttaatatggcggcttaatactttatgtatatatctaatagtatcattgccggtttcaattccataatttaaattgataagtttaaaccccttaatattcatcattataacagtataagtcatgggcggtgattctgaaattaacttttgacactccaattgaaaagcggagttgtttaaccctccggtaagactgtctgagaatgcaaactttttaagccggttttcactttttctataatatctgaatattataatcagaaacaaagcaaagataagtacgacgataccgactattataaacgagtgcaatatatagttgtttgcctcgcccgatattaaatcagccggaacaagagtcagcagtacccaattatttatgcccagcggatgatatgaaagaataaggcgcgaattgtttacggaagtaaaattgaatactccgggttctccgccggacatatgacttttcatttcttcaatagcattttttgtcttgttttcatctttggccataaatatgctatcaagctgaataaacggctttacatctgtaggtgaaattacaaccttgccatcattgtcaataatacaggaaaggccgcttccgttaaagctttttggcgcgattaggttttgtatgttttcttttttgcggacgcccgccagaacttggttaatcttaccgttagattctacgggaacggaaaataccaggctttgaccttcgatatatgtaattgatttttcgccgttatatgaattctttatgccggataaattgtttaggttttcagtatttgagggaatagttttattgtttttatcaagcaagataagagaatcgaaatctaatatttctgcctttctgtttaaaaattcttccagcaaatcttcatttggtaactttttaatagagtcgctcaataattccaaagccagttcaaaagagtttagttttgatgatatatcattggcttgctgaaatgacgcgtctttgacataagaattggtgctgttttcaagaaccgtgtttagcccggaggtgttccatagcataaaagttattacagccgttagaattatagaaacaatacaggtttgaataacaggacttacagacatactatatatttttacgtcttgtgtttttttcattttaacaactcctgaatttctatatcataattattgtgtaataattttagcatgatttttttagtaaaacaataagatatttgagtacgtatacatatagttaattgttaaataatgaattttatgttataataatctaagaaaaacatttatcgggagaagagttatgaaagataaaaccaccttatttgagtatttatatgagaatttaaaagaacagatagtcagcggcagaattaaatgcggtgaaagtcttccgtcgatgaacagtgtttctgaacagtataatataggaatacggacagtaaaagatgttttcagagctttgagcagcgagggatatattaagacagaggagagaaaggctgcggttgttatctacagcgataataaagacagccaagaatcagcggttaagtatgtattggagcgtaaatcatttattgttgaagtttatcaaaccatggccttgttgatgcctgaactgttttgtttttcgtctcaggtttgcggtcagaaatatttagatttatgggaaaagagcttgagccgcagcaagaagaaagatacgcaaagcagatggagcgtggcttctgattttctttatgatattttggaaaaatcaaataacttactgttccgcgatttatttgttagtttagaggtatatgccaggcttccgcttttttcaagccatgacggatttattgagttagtggatacaaaaagtatagggaattcgatgtgggtaatggaatcattgcttaccgggaacagaagcgaaataatttatagattcggattaatgtatgacgcggtaattaacgcaatacaaaagtatttggatataatggccgaaaaaaatccgaatgtcgaagagggagagtatgactattcctgggcggctgaaaggggaagagaacattactatactcaaatagctcgggaactgatagataaaatcggaagcggaatatataagccagacacatttttgccgcatgaggctgaactttctgaacaatatggagttagcgtatcaacagtcagaaaagctattttaatgctgaatgaactagggtttgccaaaacgtttaatgcaaaaggaacaaaagctatgctgcagaataaagaaatggcgatgaaaagtataaagaataaaaaatacaagcgggatactttaatgtatttaagcgctctgcagcttatgaccataacggttaaggctgcggcggagtcagcctttcaaaacatagataaagatgttataaatgaattggatgaaaaaatgagttgtcatgattccataaatcttgattgtattcaggaatgtataaataagtatgtgagtttgcgtcctttaaaaacaatattagaggaaacgggtgaaataatttacgggggatattattatgctttttacagagacggcagtcaagccgcaaatttactgaattttaaaagtcaaaaggcatttgaatgtttaaaacatggggataaaaaagggtttgccgcgaagacttccgaatgttacggtcatatccttaaaatagtgcgtgattatttaattggatatggattgacagaggccaaaaactttgtagtgccggaataaaaataatatataattgattagctgtgctgaaaggtttgcaaatctaatttttattaaatacaaatcagataagtaaaaatatggcaggtctgaattattcagacctgccatattataattatatgttatttttataagaaataacatattcggaagttatgaagattctatatattttaattaaatacaattgtcgattttatttaggatatatgggataacaaaaaatacggcagctgaaaatcatctcagcataggctgatttataacagctgataaaatcggctgtacgtgaaacgtcctaaatgtttttatctgcttataaaaaagctcttggcagattacggcgacatagttagttaaataaaatttttaattttactctctgtgtttacatgaaataaatttatgaaattcctcaggaatattttcggcagataaattttcatgaaccgaacatgttccggcttcctttgcggtttcataataccagcatttataattcagcatatcaagcattttttgagtttcttcaatttgccgctcgacagctttcttttgcttagtgataatttcgagacgtctgtctatagtgccatcgccctcaatacataagtcaacgaattcttttatatctttgataggcatgccggttttttttagacattcaattatctgaagccaagacatgtctttttcctgaaacattcttataccgccgctggaacgttcaataaacggcagcattccttctttgtcgtagtatctcagcgttgacggagccacatttaatctctttgccatttccccaattgtataaaccataaccagtcctccaaaaaaatagaaaaattttcaaaaaaggtattgacttaaagctaactttaagttgtataatgtatttgaacattaagaattgtatcacaaaatttaaatcaagtcaatggaggaatagaaaatgagttttaatatgtatgtaccaacaagaatattatttggtttaggagctgttaaaaaactgcatgaacaggagtttccgggaaagaaagctgttatagtaatatcaaacggcaagtcaacaaaggaaaacggatatttggatactgtaaaaagtgaaatgagcaaggcgggagttgagacggttgtttttgataagattcagccgaatccgcttaaagccacagctgaggagggcggaaagttcgctcgtgaaaacaactgtgatttcatagtagccttgggcggcggcagtgttatggacgcgtcaaaagcaatagctgtttcagcaactaatgacggagacttatgggattatgcctttggaaagacaggcaaaggtatgccgataaaaaatactccgcttcctatagttgcagtgaccacgactgccggaaccggttcggaggtggaccagtggggtgttataaccaaccctgaaactaacgaaaaaataggattcggcggtatagatgagctgtttcctataatagcggttgttgaccctgagcttatgaaaactgttccgccgcgttttacagcatatcagggatttgacgctttgtttcatagtacggagtgttatattgcaaagtgctcaaatcttatgagcgatatgtatgctttaacggcaatagaaaatattggcaattatctgccaagggcggttaaagacgggaatgatattgaggcaagagagcatgtggctttagcgaatacattatcaggagttgtaatgaccttgagcagctgtataagcgagcactctattgagcacgccatgagcgcctatcaccaggatttgcctcatggagccggtctgataatgatttctaaagagtattataagtattttatcagccagcatatttgtgacgagcgttttgtcaaaatggctaaggcgctgggtatggaaaacgcggataaagctgaggattttatcactgcgcttgaaaaactgcagaacgattgcggtgtaggagatttaaaaatgagtgatttcggaattgagaaaagtgaagccgatgttatagcagccaacgcccgtgagacaatgggaggattgtttgaagctgacccgtgtgaattgggtcatgaggactgcgctgagatagttaaaaaatcttatcgttaataggaggtctgtttatgaaaggtctggtattatattactcatacagcggtaacacagaaaaagtggctaaaatgattcaaagagccacaggttttgatatagctgaaataaaacctgtcaaaaattatgaaggggactataactcggttgtaaatcaaggaaaaaaggaagttgacaatagggttgaacctgagatagtggatttaaaatgtgacttgagccaatatgataccatagctttgggctcgccggtttggtggtatacttttgctccccctgtcagaacagtgctgtcgggaaatgattggagcggaaaggttatatatccttttgcaacaaacggcgggtggcttggtcacacctttgaagatataaaagatatgtgccggggagctgaagtaaaaaacggacttaatcttaaattcagcggaactgctatgaagacaaagaaagacgaaatagaaaagtggacagagaatattaagcaaggcggtgagttataatgaataatattggtatttttccgagaggcggagaactgcctgaaatgttcgcagaatatttcagcggaaaagcgtatctcaatatgctcactgaaaaaggagtttctataggtaatgtcacgtttgaaccgggatgcagtaaactggattatgtagcataagagtgtatagcgtgtctgtagtctgatttttgccataaataagtacaggatacacagagaatagaaaagaatgtgtattcagttaaataagaaatagatagctggtatgagagaacaaggagtctttcataccagtttttttgtgggaaaagggataggttgcacaggatctgccaggagatttcagtaggtttgatgaatagctttcttccagaagtgtggtatagtcttgtgcttggaacaggaaaactacacagaagggagacaccgatatgacaacacagccagatattatctggaatgagcagtgcctggggatacggataggagaacaggtatgcacctatctgaaaaagcatgatgcggaataccagagactgcaaaagaaaatactggaacttacagagaagtatccagtgatagaaacatttatggagacgaatcagtcaatcagcctaacggaagaagagcataaggcagtacatcgatatttccaactggagagcgaaaaggaaatgatagaagaagagtaccatttttatatgggacaggctcaaatgatttcttatggagctatgctggggaaaataaaaaaagcaatactgggaaaggatgacggtgacacacagaaactgctggaattgctgctggatacctggattgatgaggtcgaagaacagctgaaagaaaatatagcgtaccagggaatgctggaaaaaatatcaaaatatgaagaacaagttcagacaatgggattagcaaaagaaaagcgaaaaacgatagacgcatatgttactgaagtcagtgaaagatggatattatatgcggaatctttatatcaggccggtatgcagaaaatcttagaactactgaatctgtaataaggacggataaaatggggaagcacgattgaacttccccatttgtcacttctattcgtctttgccatcaatgagaaatatgtatgaaacctgaaagatttcagcaatggcttttaattcaagatcagtgacataacgcttgtttgtttcgattctggtgattacatttttatccatatcgtaaccagctaactggagtttataggcaagatcacgctgagacatattgtgagtcctgcgaagctcaatcaaccgttggctgatcagattcttctcaccagactgtgtccttggctttggcattttaaatctcttcctctctggtaaaaggatggcttgtctcactttttgcaccatctgtattgattttaacgattggacaaggtagaatcggttgtaaaagtgagacaaagtagaagagaagggagaaatatatggagcaggcaaagatagaacagcttgcatttttatatctatgcagcgagcatgataaaaggttattgctgaaaaaagaaaaaatgccgttagctgattttgacaggttgacctacttgatttaccattttggttttaaggaataccatataaaagtgtggatggaatttgcaggagagttcaaaaaggaatgggattgtctggaagcacttcaggaaatgggggctgtgttggaaacataggaaatacagaatcagaaattagcttgcataaaatgtggatgcagaatttttgtaaaaatgcacccaaagaaagcagagaatggattcaaaaattgaattaaaatatgcagtagaacatttttgtgatatcattatcaatagagcagatttgtattttatgaatttgtaaaagaataatgaagcaaaaaggtgtgaagctaattatgagtgaatatgcagatatagtaattggaaatttatcattacattggtttagaaactatttggatagcaaaatcgttagtctgtttttttcaaaaaatgaccttattgtagtaaataattgtaatatagacgatgatgataaagatgccggaacatacactaaatatatgtataggacgactgttcggcgtgcaaaagaacgcttagatgcacagggatttggacttaataattttgaaaaaatatttaatgatgaaatggttcaagcagtagactactcatcttttttgtatcatttacagggagattatgatgaagaggacaagaataatgaaattcggattaagaaaaatgtttcattaaaaaaatggaaaaatgcaatgaaaaaaattgtttcttatgaacttgcaaatggaaacatacaatttggaggaacactttcagaggttaatattacaacagagtgtgacaaagttatattttattctttgaaagatgaggatagcgaatcattttatgctttaaatcctgaaataatcaattataaatatgtatacagacttatactagaatattgtgcaaatgatatggagataatattggatttctcaaatttggataattgggcagatgattgtattcccaaagcactagcagcgacagagaacgtttcaaaaacaattgttcttgttgaagggtcaagcgataaagatattttagaatttgcgatgtcacagttatatcctcatctttcagatttattttattttatggatttcagtgatgaatctggtggaaaaagagatggaggaacatcatatgtaataaaaaatcttaaaactttttatttttcaaaaattagagcaaattttattgcaatttttgataatgatgcagagggatattctagtaaatgctcattattaaatgaaataaaaaactggccggcaaattttagaatattattatatccagaaattacaatgtttcataaatacccaactattgcacctaatgggaaaattgtgcctgatgacattaacaagaaagctgcttctattgaattgtatttgccagattccattataaaaactggtgggaactattatccaattgaatgggaatcgagaaaacgaatacgaaataaaaataatgttgaagaagcattatatcaaggagtgatttcttataaagatgatataaagcataagtttcatgaaatgcgtaataaaattgagagaggtgatgaagtttttaaaacagaagaatggaaaaatatgaaaaaattactagaaacaatagtattcgcttttaataacgaacaataaatagcaacgtaaactaatgcaaatatcatgggcagggctcttcggggttctgccctttttctttttccagaccaaaagaccacctgctggaaaagaacaagaaaaacctgaaaggatgtggtgacttatcattataggaatcgatcatggatattatgccatcaaaactccccatgtgtgtttcccgactggactgaccgggtacgattatgagccgtataccatgcagaatgtcctgcagtacaatgggaaattttatgtgtgtggaactgggcggcagacgctggtgagaagcaagacttccaatgacaattattatcttttgacaatggcagccattgcacaggagatccgctaccgccggggagagaggaaaacagatgtggttctggcagccggcctcccactggcaagttttggcagggagaaaaaaggtttccgggaatatctgtttcggaaagagcagcctctgcgtttccggtacgaggatgagagctatgagatccggattcaggatgtaaaactgttcccacagggatactctgccctggctcttcacccggaatgtgttcgggacgagccttctgttcttctcgcagacatcggtggctggaccgtagacctgatgcggctggacaacagtgttccaaacgccgctacctgccgcagcctggagcttggtgtgatccggtgcgtggatgagatcaccgagcaggtacgcagaaataccggactgtctgtaacggacattcagatcgaacgtgttctgaacggccagagctgcagcatggacccgtccgcaaaagaaattattgtccggcagggaaggctctacacggagaaaatactgtctgcaattatggaatccgggttcgatctgaaagcaattccgtccgtgatcatgggcggcggagccagcattctgaaacggcacgtgacaccgcaggacgggttgtgtcggcagatttacctgacggacgtacacgccaacgcttccggctatgagcggattgtggggcagatgtgcgcgaagtaaagaggcccgttttctcgtttcgcctgaaccttgataacccggatcaccaaaaggcatggaagattctgcaaagtgttccggatgggcagaagagcagctatctggttcaggtgatcttaaaagatcaggaaaacaaccagctggaggaaagcatccggcaggcaatccgggaagaactggcaggtgtttccatttcaggctccggggaaagtgtttcaaataaggaagaaatcccatcccagatgctggattttctctccggattagagaatgcattctgaaaaagtcaagtcttttccggtgataaaatagccaaaattcaagcagtcaaattagtataaatcacggtttttgaaaggggtgatgcctattgaatgttattagatctgcatcctttgggggcttttgaaagcctcatattcgttgggtattgtgaatagctttctgtcacgttttagggtatgttgtgtgtagaaaaaagaaaggagaacaaacgcagtggagatgaaaaacatatgcggaaagattccggtagagctgcatgagaggctaaagctggaggtcgaagagttaggaatcagcataccaaaataccttgaaatggtaatcgaagaacacatgacaagaaaaggagaaaagacgaacatggcagagttaagaaccgtagcagtacaggtaaccgaggatttattttccagactgaaagcagttctcgccaaaaacggcatgaaacagaaagacttcctgattggactgatcgaagaggcactcgaaaaagaggaagccaaatggaaatcggaaacagaagaaacggaagagccggaagaagaaccagcagaaacggaaatggaagaagctggggcagaggaaacggaacctgcggagccagagccggataaagagccaacaaagcctgagctggaagaagctggaacagaggaaaatctgacagaatcggaagcagaagagccggagccaacagagccggaaccggaagaatcggaagccgaggaagagccgacagaaccgaaaacagaagatccagagaaaacagagccagcagaagtagacgaagaagaatcagccgaaacagaactggaaacggaagagccggaagcaacagatccagaggaagcagaagaatagacatcaaaaaacagaaaacaagagattgagacggtgcagagaaatctgcactgtttttttcgcagcgaagggaggctgatagccggaacaattcgattttttgaccttttcagcggaatcggaggattccgagaaggactgcacagagcagggggcttcacctgtgtcggacactgtgaagcggatgcgtatgcagaccacaactaccgggtgctgtttgatacggaaggagagtggttctgcaatgacgcaagaaatattgaaacagaacgaatgccggactttgatcttttatgcgcgggatttccttgccaggcattctccattgctggacgaagggagggatttgccgatgcaagaggaacccttttcttcgaagttgccagactggttgcagataaacgacctgcgtattttctccttgaaaacgtacccggtctgctttcgcatgacaaagggcggacgtttcacaccatcctcagtacgttatctgaactggggtatcatgtcgaatggaaggtgcttaacagcaaggatttcggagtcccccagtcaaggaagcgggtgtatattgtcggatatcttgatgaaagatgtgccggaaaaatattacctttcccaaaaacaaatggaacagctcttatacaagtccatgctggcaaacagggagaaagagtctacgcagaagaaggactgagctgcacgctgaccagtggggctggcggcatgggcggtaagaccggattatatgaagtcggtatcccaatcaaggaaaataccagaaaagggtacaagatggcctacgagggagacagcattgacctcggctatccgggtatcaacagccgcaggggaagagtcgggcatgagatcgcccatactttgacgaccggaaaccagcaagggacactgcattttgtagatatctcgcctccgccgctggtgacagatgttgcaaggtgtctgaataccagacaagattccagcatccataaccacaggggcgaaagttccggggtgctggtggaagaaacgccaagggcagtgctgacaccggccaaagaaaaagtccgccagaatggaagaaggatgaaagaaccggaagagccaatgttcaccattacggcaaccgaccgtcatggcgtgatctaccacggcagaatccgcagactgacaccaagggagtgtctgcggctgcagggataccgggatggtcagatttccaagatggaaaaagaaacatcggataaccagctttacaagcaggccggtaatggtgtcaccgtcaatgtcattgaagcaataggcagaaatttgaaagcagtagatgaagagatccgaagcggctcacctgttccagaagcgaagggtgggtgaagcagatcgatttaaaaaaccagtatttcggtacagagattgagatgacaggcatcagtcgttacaaggctgctgccgctgttggaagaatgttcggaacagagccatattccatccgctcttacagctcatggtgtgtgaaagacccggatggaaaggtctggaagttttcctatgattccagtatccgttgtcagtacaaatctcacggaagatgtttgaatgctgacagcgactatgctacggaaatggtatccccgaaattggaatattcggaaatggggaaactccaggaagtggtgcggtgtgtcaaaaacgcaggtgcttttgtcaattcatcctgtggcatgcatgtccatgtggacgcatccaatcatacaccaaggagtctgaaaaatgcactgacgatcatgtactgcaaagaggatattctgttcaaagccttaaatgtacagaccagaagggaagatgagtactgccagaaagtccgtcctatggtattggagaagatccgcaggatgcccaacagcaccattacaatggaaaaattcaaaagggcatggtatgagggaaatgacggaagctccgagcattacaactggacaaggtattatgcattaaacctacacgctgttttttccaagggaacactggaatggcgctgttttgaaagcaccctccatgcaggaaaagttcggtcgaatatcacactggcacttgccatatccgcacaggcgatcaaccaatcttgtacccatgcaaaaaagacggagatcggggataacccggcatttacgttccgcacctttctgctccgcctcggattgatcggggacgaatacaaaaatgtgcggaagcatctgcttgccaatctggacggcgataaagcatggcggtatgacaaaagcacctatgcctgtctgcagaatccaagacggacagacgatgcaaggtaacagaataacaggaacagacaggccgggtggaaacatccggctgttcttatgacaaataaaaagaaaaagaagaaagaggtagaaaacatgaagagtaaatatcaattcaggcgaatcctttccggggtgatggcggcagtcaccatcttatccacggtcatttcaccgctgaccgtttatgcttcagaagagccgaaagcggcagaaccgccagtgtatgaagctgtaaaggatctgctggatgaaaatgaagtggtaaaagccaccgattttgaactggaagttggacaggagtttgatgtttccagtgaccgcacgaatctggaaatcgaggatgaaagcaaggtcaaggtgacattccagaaagcagagaatgacgccggggagagcttcagtaccagccatgcggacacttaccatgccgtttattatgtggaaccagtcaaccagaaccatccggtttatcagattgggagaaacctgatcgtaaaagagcctgtggcagcgtctcagagtgaaccacagacagaacaggcagttacagaagaggatacaggttctgatgatgaggaagctgcctcgcaggaagaaactgagacagagcctgtagagacagaaattgttgagccggagacagctgaatttgaaacagaggaagcggagacagaagaaccggaagaaacagaacccgaatttcaggacggactttccgaatccgagtttgatgctgcattagaggaatccgaaacagaaaatacaaccgatgaagaatccgggctgacactcagcgatgtcctggagcaggcaggggaacaggatattgacctgatggcaatggaagatggggaaaccgtttcattcaccgcagtcaataccagtacaagagtaacacgggacgtaaatgtgacaagagggactgcatactattatgcagactacggtctgggttcctacgtaacttataaatatactgtaaaatttggaaacgtgtctgcaactgcctactgtgtgcagccgtccaaggcaggaccaggggatggtgtctataagattaccaaactgggtgacagcaaagcactggcaaaagtatgctactacggcacaaaagcatccggcgaaaatggatttttctcagagaaacatcctgatttttccgctggaaaacaatttatcattgtccatctggcagcgtcttatgccaataacagcggtgacgctttttccggtacgaatgcaaccggacaggctcttgcaaaagaactatatgattactgtatgagccagccggagataccggaagtggacatgagtttctccaatgcaaatgttaccgcatatatcagcggcaacaaccagagaacagaagagatcaccttcaaggcatccgaactgcagaccatcaccatgaagctgccgtccggtgtcaaactgcataatgtgacaacgggaaaaacaagcagtgcaggtgcatccgtggagatctgcggcggtaccaaattctacttatctgcaccgctgacacaggcagtgaatgtcaaaggggaatggtctgtcaccatgaagggaagcatcatcaaagattattccgcttataagatcacaaccggaagcgagacacaggaccttgccctggtatttggcgagggtgtgaccgatgagaaatatgtagattttaaagtatcatgggtaaaacaggcaactctggagatcgtaaagaaagaccgtaagagcaacaaagccatcgcaggtgcagtttatggcgtttatagtgacaaggatggaaagaacctgatcacaaagatgccggccacagatgccaacggagcttccagcgttatgatcaccaaaacacaggataccgtatacctgaaagagatctccgtaccaaacggatatctgctggataccaaagcctacgatgtgaaactggtcatcggggataccgtaaaacagaccgttaccgatgcagagcagatggcaagcctgaccgtttacaaattaggcgaagtcctgaccggagcaaaggtgaccgatgatggtgtttcctttgtttatacagagcagaaacaaaaaggcgcggtttacaacgtttatgctgcagaggaaattgtatccgcagacggaacaatcatctacaaaaaagatgcactggttaaagccggactcaccaccggggatgacggaagtgccacactggataagctatatctggggaaatatgtggtaaaagaaatgcaggcaccacaaaatctggtatgcactggtgaaagccaggagatcaccctttcctatgccggaagtaatgtggaaaaggtcatgggaagcgtgacattcaaaaatgaccgccagaaagcaagcgtgagtgtatacaaacaggataaagaaaccaggaaatatcttccgggcggcacttatggtctgtatgccggaaatgacatcaaagcagcggacggaaccattgtggtcaagaaagatactctcattgagaaagcagtgaccggaacagacggaaaagccgtatatcaggcagacctgccgatcgccaacagctactacatgaaagagctgggtgcaccagctggatatgtgagaaacggcgaggatgtgtactcctttaccttccagtacacaacagacaaagaggcaacggtttctttcaaccatacgttccagaatgagcggatcaatgcgaagatcaaactggtaaaagaggattccgaaaccggaaagaccgcacagggagatgcaacacttgagggtgctgtttacggattgtatgcccgtgaagatatcgtacatccagatggacagacaggtgttctttacccggcaggaacacagattgcaaccctgactacggatacagagggaaatgcagaagtcgcagacctctatctcggaaagtattacgttaaagaactgactccgcctgtcggatatctggcagacacggaagaacatgatctggagtgtaatgacgagggagatctggttcagacggtagaacgtaccgtaacttctctggaagatgtgatcaaacagccgttccaggtcatcaaagccgccaacaatggaaagaccgatgccgatctgttaaaaggtgtgggattcagtgcatatctggagagcagcctgaagaaaaataaggacggttcctatgattttacatccgctactccggtcatgctgactgcagacggacagacagaaatgttcacggatgagcgtggatatgcatgctccattccgcttgcatacgggacttacattgtaagagaaaccaccacaccgcacaacttcaaaccagttgatgatttcaaagttgtgatttcagagaacaatccagagaaaccgcaggtatggcgtgtgcttctggacgaagagtttgaagcaaaattaaaaatcgtcaaaaaagatgacgagacaaagaaatctgttctggttccgaatactgaatttaaggtatacgatctggataacaagaaatatgtggaacaggtgactacttatccatccactacggtacataaatcctattttacggatgaaaacggatacctgatcctgccacagaatctggcttgtggaaattaccgcatcgaagaagtgactgcaccagatggatatacccacagcaccaataccgtggaaatcaaggtagacagtgataccgcataccaggaagatccggtcagcggtgacctgatcatcgaggtggattttgagaaccacccagctaagggcagactgaccatccgcaaagaaggcgaagtagtcaaaggttttgataaagattttacttatgaggaagccagccttgcaggagccgtgtttgaagtttacgcctccgaggatatctataccgcagaccatcagacagatgagaacggcaaccgttatctggaatatgccaaggacacactggtggcaacggtaacgaccgatgaaaccggaagtgccgtaatcgagaatcttccgctcggaaaataccgtgtagaagagaaaaaagcaccggaaggatacacctggaatgccaaaggagaagaggtaacctttacctatgccggacaggataccccggttgtagacgaagaagtgacatttaccaatgaacgccagaaggtaagcatcaccgtggaaaaacaggatgcagaaaccggaagcgtggtagctggagccgtctttggtctttataataagaatgagatcaaatccgatgacaatgtaatcgtgaaagcggacaccttattacaggagattacaagcgatgaaaagggacaggcacacttcaccctggacctgccgcttggaacttattatgtaaaagaaatttctgcaccggacggttttgtatcctctgatgaggtactggaatttgatgccacctatcagggacaagacatccagaccattaaactgaaatcgattaagaagaaccagccgacgaccatcgaggtgacaaaatccgatctgaccacaggcgtggagttgaacggagcatccctttctgttctggatgaggatggaaacgtgatcgacagctggacttccgtaaaggatgagcctcatgtgatcaaatatctgactgttggaaaaacctatatcctccgtgaatcccttgcaccgcatggttatttaaagactacggatgtgaaattcaccatcgaggataccgcagaaatacagaaagtggaaatgcaggaccatgtaccgaaagcactgctgatcgtaaacaagaagggcgaattccttgataagatcaccctgctggataacgtcaaaggtgttgtggaacatttctttgagtacattacaggaagcctgacagacgttaccttcgaaatccgtgctgccgaagatatcaaagcagctgatggcgtaagcccggactattattccaaggacgaactggtagcaactgtaactaccgatgcaaacggtgttgcagaagtatctgaccttccggttggaaaatattatgtcaaagaggtaggcacagcatatggttatatcctggatgaagaaccacgatatgtagatctttcctaccgcgatcaggataccccggttgtcgtatacgatgaggactggcagaacaaccgccagaaggtgaaagtgaacgtcctgaagaaagaaaaggataccgaccgtgtattaaaaggcggcatctttggattgtacactaggaacgacatcctgtccgcatctggaaaggtgctgatggaagcagataccctgatcgagttaaaaacaacagatgtagatggaaagatttcctttattgcagacctgccgattgacggaacctattatgtgaaggagctgtatgcaccggatggatttgtcaccaccggagaagaacaggaatttgtttttgagtaccagggagacaaagaagcagaagtgtcctatgagttcgtatttgaagatgagccgacaaccgtggaactttccaaaaccgatctgaccacaggcgaggaactgccgggagccagattacagctgacggatgaaaacggggctgttgttgaggaatggacatccaccaaggagccgcacatcatcaaagaattggttgtaggaaaatcgtacaccctgacagaaaccaagccggccgatggatatgccactgcggaaagcatcacattcaccgtggagaatactgtagagatccagaaacaggtaatggaagatgatgtgaccaaagtggagatcagcaaaacggatattaccggagataatgagatcgaaggagccaaactgaccatcacagatgaaaatggcaatatcgtagaaacctggacttccggtaaagagccgcattatatcgaaaaacttccaatcggtaaatacaccctgaaagaagagcaggctccaaacggttatgtcgtttcggaagagatcaccttcgaggtggcagacaccgcagagatccagaaggtagccatgaaagatgataccgcaaagggacgtctgatcattgagaaaacggacaaggataccggagctgcactgaaaggtgcggaatttgaattgagggatgccgatggcaaagtggtagaaaccctgaccactgatgaaaacggtcatgcaaccagcggactgcttgcaatcggaacttataaggatggcaaatttgataaggcagccacttattatctggttgagaccaaagcaccggaaggatatcagctggatgagaccaagcatgaagtgacatttacttatgtagatgacaaaaccccagtgattgaagtcatccagaaagtgacgaacgagaagttgccggaggacaccccgtctgtaagtaacccgaaaacaggcgatgacaccaacctctggattccggccctgtgcctgattctttccgcaggcggtctgattggtatgagtgtggcatccagaagaaagaagaaaaaagggggcagataggctgaaacaattatattttgcgtatggaagcaacatggatctggaccagatggcatatcggtgcccaaaggcggaggtggtagaaaccgtccgcctggaggggtatcgactgacctttgcagccacaggaagcggtcttgccaccatcttcccggaagagggaagccatgtggacggcgtcctctggtcactgaccggggactgcgaaaagagcctggatctttatgaaggctatcctgatttttacgacaaacaggaaatcaccgtcaagaataaaggcggaagagagatcaaagccattgtctatatcatgacaaaagattacatgcagaactttaatccgcccggacggtcgtacctgactgggatcttaaagggctgcagacagaaccaaatcccgacagagccgatcctgaaagcagcaaggaaaccgcctgtgccgggaaagacacagaagagtcagccaaagaagcagagaaaagccggacaggaacgatgaagaaaaaaccaaagacaggaatcttacagaggtttttcaagatcatctgccttgcagtgacgctgacaagtgccgggtttctgatttaccacatggtatatcttccaatggagaacaaaaagctggtggcagagctgaaagggaatttcccggagccggaagctccgggagcctcaggctctgaaaagaaagaccaaccagctggaagaaaatgcccggtggctgcggtagaccttgtttctcttcgggaacaatatccagatgtgcagggatggctgacaataccggacaccgggattgattacccagtgcttcagtacgaacaggagaatggggagttttacctgaaacggaattacaaaaaggaatatgacatcaacggaagcctgtttttacaggcagactgcaaagtgtctgaaagtcggaaccttatcatttacggtcacaacatgaacagtggggcaatgttcggaaatctggacttctatgcagatgaaacatattatcaggagcatccctttgcttatcttcagacagaggatagcattcaggaatatcgaattgtcacggtgctgaaagcagacaggaatttgttcccgttccaacagaaacttccagatgtggcggcagtgcaggagtacttaaaagcagctaagcagagggaagtgttcgaaaccggagatgattacctgaagtgtatatacgataaggttttgacgctcgtcacgtgttcatatgaatggagcggtgccaggaacatcgtcctggcggtgccggtttccggggcagtgtggagtcagaagtgttcgtaagcacccgaaaagtgcagaaaatgagacaaataatgaccgcacgggcagggatgtgttcaaaacagggggattatgtaagggtgtgcattggtagtatttaggttgaaaaaagtgtctgaaagtaccagaaaagtgcagaatgtgagacaacttataacccagatccggcagaaagtgttccagaaaggagcgtttcctgccgttattatttacttggaaaggatggtaacgattatgaaacgattttatacagcagaatccgtaacagaaggacatccggataagctctgcgacctgatcgcagacagcattctggacgcgtgtctgaaagaggacgaaaattccagagtggcctgcgaggtgctggcgaccaaaaggaacatcattgtggcaggagagatcaccagccgatttgagccacaggtgtttgaaatcatcaaaaaggtgctggagagtgcaggctatgaagcagaggaaatccacatggatgccctcatccacaaacagagtccggatatcgccggggcagtggagagatccagagaacgaagggcagggactgtttctgttcagagcggacttgccagcggtgccggggatcagggcatcatgattggttacgcctgcgatgagacaccgcagcttatgccgatgccagtggttctggcgaaccgcattgtaagggaactgtctgcaagccgtagaagcggatatatcacgggaatcttgccagatggaaaggcgcaggtgaccgtggagtatgaagatgacagacctgcccggctggataccgtcattgtgtcctgccagcatgaaaaggaaaaatcccttcggaagctggagcatgagatccgggagaaagtgttacgcccggcactccgtatgctgccaccggatgaggataccaagatcctgattaacccatcgggcagatttgtgtgcggaggtctggatgcagacaccggactgaccggaaggaaactaatggtggatacctacggcagcctggtacagcatggtggcggtgcattctccgggaaggattgttccaaagttgaccgttccggggcgtacatggcccgttacatcgccaaaaacatggtagctgccggacttgccagccgatgccaggtgtcccttgcctatgccattggggttgcccagccagtcatggtgcaggtggatacctttggaacgggaaagatctgtgcggatgactgcctcgccgcagcgatccctctggtgttcgggcttaccccaagccagatctgtgacaccttgcacctgaagcggccaatctaccgacagagtgcggtgttcgggcattttggaagaaaggaattcccgtgggagaaaacggataaggcagagcagctccgggataccgtgatgtaatgccgtggattccggaagaagaaatcaaacgtgcaagggagatcaccgccattgaataccttaagaaatatcagccaaaccgtctgaaaaaatcttcagccagaaatgaatgggagctgacagaccacgacagctttaagatcaacgagcagaccagccagtggcactggaaatccagagatatcgggggcaccagtgctttaaatttcctgattcatgtagacgggtgttcttttttggaggcagtgcaaatgctgaaagatgagtatcccacctatatccctcctccagtggaagcaaagccaaagaagccatttgtcctgcctacggccagcccggactgccgcagggtgttccgctatctgaaagagcggggcatcagtggcgaggtcttacagcggtgtgttcatttgggaatcttatatgagagtctgccctaccacaatgccgtgttcataggccgggatgaaaaccaggtggcaagatatgctttcctgcgtgggatttacgatgccagcggaaagtcttttaagatggaacaggccggaagtgaaaaggcatacgctttttgtgttccggcgaaatcgggatgcagacgggttgctgtttatgaagcctgtgtggatgtgcttgcccacatgacattggaacagagacagggaagccgggataagtaccgtctggagcttggcgggatcagcgcaccaaaagaagggcagagccagcggagcatgaaaaagccgcaggcattggaacattttctgtcccagcacccggagatcaccgagatcgaagtgtgtaccgacaatgactttgccggacggtgggcgtgtgaacatatccgaaaagcctacgagggaagctatcggatcatcgagaacctgccggaaatcgaaggggcagactgggcagacatggcaaaaatggctgcccgtacaccggagaaacggcagaatagggaagcgaggtgatgctttgaaagataaaatagaagtggaaatgctgtcacctctgatggcagagtttattccggactattcagatattgtgaatctggatgatgcggagccattggaaggacctgacctggtgcagtatcagacatccatcgcagaaaaggttgacgagatcaatcggctcggtatgcctgacaaccagccatgcaacctgatcgattattttgaccaaaacaaggacattaaggaaaaagtggaacgcattacaatggcggtaaaggaacaggagggcgttttatatggctgtgcaaacctgacactccgggagaatctgacaccagaggaataccgtgtggtggggcagtatctgagagggcagtacagcgatggctggggagaaagtctggaacagcgggagatcaaggtagacggtggtgaattatacttacatttctatgttggtgccggctcggatttccagatacaggtgaaagcaccggaaaacggtgtgcaggaaaagcagccggaacaaaagccgtcccgtccagaacttaagctcttagggcatgacggaaatattttctcaatccttggggatgccgcaagactgcttagacgtgccgggatgtccgaacaggccaacgaaatggcggatcgtgtccacaagagcagcaattactatgaagcgctgggaatcatcagcgaatacgtggaaaccgagctgtcggaccaccgtgaacagcccagaacgccaagaaaagaaacactgaaaaaagaggatacctgccgatgagcagttccataaagaaaagcacttccagagaaatctggaaaataagcgaccgaaaggatgatgcctatgggaaataccctgaaacttgaagatcttttaaaaccggactgtgtgccggatgagtctgccggaggggagaactggcgtatcctgcatggagataccttaaaactggtcaaaggattccagccggggatctttgatgcagttataaccgatccgccctatgcgtccgggggaaccaagcagaacgaacgcaaccgaactaccaaccagaagtacagcagcatgaaagcagaaaatgccctgccggattttgatggggataataaagaccagcgttcctggacccactggatggcagaatggctgtacgatgtgcggaaagcctgcaagagaggggctccgatctgcctctttattgactggagacagtacccgtccatcaccgatgccctccagtgggcagggtggatctggagagggactgccgtctgggacaaggggaactcccgtccgcagaaaggcagattccgccagcaggcagaatatattgtatggggaagcaacggaccgatgccgatcaaccgcccggtgtcctgccttccgggtgtgtttcgttatggaaatccccagaaccgcatccatgtgacagaaaagccgctccagctgatgaaggatgtcatccagatctgtgagccgggcggcctgatcttagacccgtttgccggagctggtactaccatccttgcggcggcagagtcggggtttcaggcagtcggcattgaagtgaccgatgcgtattataagctgggaagcgaccgtgtccgcattgcactggaagctggggaagaagcggaaaacaaagaaccacagtagccggatgtctggcagacatctgaaaaagagaagaaaagaatccagatgtccacaagacatccacagagcggaatgctttgtgggtgtttctttttggaaaaacgccgggcagaggaaacctgtccggccaggaaaggagatggtcgtattggaacaggcacttgcttatgtctgctgttctgcagaagaaggaaagaccaaagtacagcggtactgccggaagatctacgaactgggatatgtgccgatctgcccgcagtacagcttttccccattccttgatgacggggatgcagaggatatgcaggccatgcggagaatgtcccaccagatattaaggcggtgcaggatggtggtcgtctgcggaaaagagaccaccgggacgatgaacacggagatcagcatggctgacaggcttcatatcatctgtaccacactggatgggttaagcaaaatcaaggaaaacgagtgattcagagaaataacaggttcagaggggacgaagcaaaatgcgactggttttgcaagcatagcgtttggatatccaaacgcactttggggagaaccccaatcccccataccaagccgtaaacagacgaaaggagaacgaaaaaatgttgggatttatacttggcacaatgaccgaaggagtaatgggagtttttgcaatgtgtcttttcatagctgggaagcgtgaggatgaggcactggagcggtgccggatgaaacggaaggagatcatcgaccacggcgtgtgcatctgttttgtaaacagccagggagaggaactattccgtctggcagacggggaaagccttgtgcagaatgcccaaaatggagagcggaatgtatccacctgccattatctggatgccgattctgccatgatcgatgggaagaaatggaaccttctggaatttgcaaaagagatggaaaagagagggatcatgttcgccccgatggtgctgtgccaggtatcggaaagggggtgaggcccatatgaagaaaaaaatcattgctgcagcggtagccatcggcgtcctggcaggtttcctgatctggaaaaatcgtgaaatgtaatggagcaacaaccaataacccgttggaaagcaggtgaagagatgagaaaaagaaaccatgtgataccagtccgcctcaatgcgaaggagctgcgttttctggaagagcaggtagagaaaagcggcctgtcccgtgaggaatatatccgttcccttgtcatgggcggcgaagtccgggcaagaccctgtgagcatcatacggagcttttgcggaaaatatccggtctgtgcaacaatgccaaccagcttgcccatgtagctaacggctgtgggatggccggggaagagagcatccgggaaatgctccgcatgacaaaagaaacatggaggctggtcaaagaggaatggtagccgatggcatacaccagtatcatcccggtcagccgtctggacaattccatcacgtacatccgaaacaaggataagaccacaaaaaaagggcaaagtgccggctctctggaagaagccattgattacgccatgaaccgggacaagacggagcgttccatttttgaggatgccatcggctgtgtctgtgagactgcctatcaagatatggtagctacaaagaaacgataccacaagatggacggggtgcagggcttccatctggtgcagagctttgccaaaggggaagtcaccccagagctggcccaccggatcggcatggagctggcaaaaaggctcctgcagggaaaatacgaagcagtgatcactacccatctgaacacggagcattaccataaccacattgtgtttaattccgtgagcatggaagatgggaaaaaatatcacagcaacagcaggagttactacgaagatgtgcggaaagcttcggatgccttatgcctgaaatacggcttatccgtcatcgagccgaaaaacggcaaggggaaatcctacgcccagtggatggcagaacaggacggaaagccgacctggagaacctcgatccgtctggatatccgggatgcagtggcagagagcttcacatggaaacagttcctggatcagatgaagcagaggggataccagtggaagctgaaccggaagtacattgcattaaaagcaccgggaatggaacggtatatccgtctgcggagccttgggaagaattattcggaagagggcatccgacagtggatcttgcagccaaagagcaggacacctgctggaaaagaaggagcttcccgacccccgaaaaagaagttaaaagggatacaggccctgtactattcctatctgtaccagatgggtgttctgaagcagaaacccaaaaggatctccccggtgctccgggcagatatccggaaactggatgccaggatcgagcagatggaatttctccagaagcatcagatcaccacccgtgaagagctgcttgtctaccgaattccattggaagaacaggtgcaggcactcaccaaagaacggaagcggctctaccggagcgaaccggacagtgccaggatcggtcagatcaccgaagaactaaagccgcttcggaaggatatccgcctttgtatccggatcgaacagcagtccagagagatggaagaaaagatgcgtctggcagagcagatccagaggcaggcagaacaggaagagcagacggagaaaaacagacaaccgagaacagaaagcaggtgaatgatatgaattatggaggcgatgcggcggaccagatcgtccggtattcgctggacggcgtggaccacgggctcaggctttcgggtacgctggcaaagcatctggcggtatttgttgccgccgtattaaaagaccagaagaaaacgaggggcagaacccggatggtgcggatgttaaaggagaacaagccattgaagttctttaccgtgccgtccgaccgcctgagagaattctgcagtgagggcaggaaacggggactgctctatgtgatcatccgggataaaaagaacccggagatgagcgaggtcatggtctttgcggatgacgcagccaaagtcaaccgtgtcatggataagatgaaccttgattttgtaagaagcgaagtcggggaagctgtccatgaggtaactgccggaatggaagcaccggaaaccgaagcagtacaggaaaccgtacagatgccggagggcgaggtgcagttcgagatcagcgatctggacgaagcattccaggtcggtgatatggatttttcggaaggggaaaagaatcagaaccaccccgaaaaggagttttctgaactggaaaattttatcccggtgcaggaagagggggaagagaatctgtccggctcttccttgcacagcagaaatatttctaccgggcaggaaaacgggactgatggagcaaagccaagggaacaggagcgtcccagtgtccgccgggagctggagaacatcaaacgggagaaagcagaggaatcccagaagaagagccgggaaaagaaccgtggaccaaagaaaacgcagaagaaagcgagaaataaacgaaaggtgaaagcgaggtagaagatggacctgacaaaatttttagggcaggacacgcaggagcagtccacccagcggttatcgaaagaagaatatgccgcacagaaaaagcaggagagggaagaaatctggggtatgatcgatggaaaggcacaggaggtcttccagaatggggactccttaaaaggattccttgattttatgggacagtgcaagccgcagaggacagacaacctgttcctgctttatgcacagaatccggagatccggcaggtcaagacctttgaaaaatggaaggaagaaggtaaggtagtcaagaccggaagcaagggatacaacttcattgtcggacaggaatatgaaaaggacggtgtcatccagcaggggtactccatccagaaagcctatgacatcagccagatccgtaccaagcagccggaagaggcagagccaaagccgatggaccagctgatggaagcactgctgaccgacagcgaggtacggattcagattgcagaccacctgccggataaggtacaggcacagtatatcccgaacaagcggacgatctatgtccgaaatggcatgagcgaaaatgcaacgttccattccatcagccgggagctggcctgtgcatcccttgaccatcacgatggaagctacagccgggcaggggtatcggcacaggcctattgtgcggcgtatgtgacagcacagaaatacggcgtggatgtctccggtttttcctttgacaaggtatgccagatgcaggcattcggacagaaagatccgaaagaactccgctcctttatccaggatgtaaagagtgcagcctattccattggcaagcaggtagaccgcaaccttggcaaaagcgagcaggaatttatgaccgatgaatttgccatcccggaggaaaaaacggagaaacctgccaagagtaaaaagtccccggaacgctgataaaaaggggcttttccggctcttttgcagtagctttccgggaggaagtgtggtatgttgtggttgagaaaaaagaggaaaaaaggaggctcgcctatgacaagaatgcgatatgtaaagatggaccggatcatgaaccacatgctgatccatgcactccgggaagtgttccggcaggaaaaagaacaggggcttccggtggataccacacgggatctggttctgaagctggcagagcaggaagagggaaagctctacctgacagaagccgaacacagcaaatccgtggaagccttaaaccagctccgggacacatacctgaaaaacggacgctattccgatgggatcgacagcgttctgttaaagatcatgaaatccagataccgcccataccgtggaaggggaagatgaagaaaggatgtggtacaaatatacagaaatatgacacaagaaagaatagaagccatgcggagaagatatccgccgggaaccgaggtcacgcttaacagcatggagggggagagccacatgccacccggcttaaaaggtaaggtggatatggtagacgatgcagggcagatccacgtaaactgggagaatggaagcagccttgccctcgttccgggagtggacagcttccacattacggacctgccaagagcagagaggcccaaacagcagccatcccggtaacaaacagccggaagtcagactgggtgatttggcttgccggactgcctgtcatctggtgggtagcaatcctgcttgcggatgccatccagccgggcaggaatcttttcgagctaatggaggttctcacagaaaagctgaaccatcccttccagtttcattatacggaatataccatcaagtcgatgctggtctgcacgttactttacgcagccgggatcggcattttttattccagtcagaagaactaccgcagaggggaagaacatggctctgccagatggggcgatgcccggcagatctgtaagaaatatagccagaagccgtactcccagaacatcctgctgacacagaacttccgcattagccttgacacccacaagcaccgcagatgtctcaacattctcgtagtgggaggctccggtgcaggaaaatccagaggctttgccctgccaaacatcatgcagtgctgctgttcgatggtcatcaccgatccgaaagccgagctgctccgaaagacaggcggtctgctggaaaagaaaggatatgaggtgcgtgtctttgacctcatcaatcccgacacatctttttgctacaatccattcgagtatgtccacgatgacaaagacgtgctccgtcttatttccaatctgatacaaaacaccacacccaaaggttcccagtcctccgatcccttctgggagaagagcgaaaccgcactgcttcaggcactgatgctgtatctgctccacgaagctccgccggaagaacagaacttcgccatgatcatggagatgttaggctcggcacaggtaaaagaagaggacgaggactacgagtcccctctggacattttgtttgaccgtctggagatgcgggacccggacagcattgccgtcaagcagtatcacatttacaagcaggcggcaggaaagacggccaagtccatcctgatcagtgtaggtgtccggctggcagccttcaatctgccgcagatcgccaagctgaccaatactgatgaactggatctttccaacatgggagaaagaaaagttgcccttttctgttgtatcccggatgcagacacctctttgaattatctggtaggcatgatctacagccagcttttccagacgctttattacatggcagaccgtgtgcatggcggtgccctcccggttccggtcaactgcatcatggatgagtttccaaacgtatccctgccaaatgagtttgagaagatcctggcaacctgccgttcccgttccatttactgcagcatcatcatccagaacatgagccagctaaaggctctgttcaaggactcctgggaaagtctggtgggcaactgcgatgagtttttgtacctgggcggcaatgaaaaagagacacacaaatatgtatcagaattactggggaaagaaaccatagacaccaacacctacgggcagaccaaaggaaaatccggcagctactccaccaacttccagcagagcggaagggagctgttacagccggatgaagtccgtatgctggataaccagaatgcacttctgtttatccgcggggagcggcccatactggatgccaagtatgacctgatgaagcatcccaacatccggtataccgaggacggaggtgccggcccgttcaattatgcgaaagcaccgctggcgcatgatgattttacatttgacgaaacaagatatgacgattacgaactgcttctggatgaggacatcatcggggagcttttttgatgggaggaatgccaatgaatttactgaaaaataagaaacacacagaaatcaggaaagagaccgcaccgctgaagatgaagagagggcagaagaaactgtttgctctgtatgcagttacggtactgtcgatctgcattggggcgacctgcgtttatgccgcaggcgatccgctgaccgtagtcaataacctgtccacgtttatcttttccctgatccgcgccattggcctgatcctgctgggatttggtatcgtgcaggtcggtctgtccttaaagagccacgatccaagccagagggcaaacggatttctgacactggcaggcggtatcatcattacctttgcaaaagagatcctggacctgatcatgggataggagaagagtccagaaggggagccatgcgaaatgccggctccctgctcacttttgaggatgggaggtgaaactgtttgagtgataactggatcgtacagaatctaaattctgccttgcagacctggagcgacaagctggctgaaatctggacactgctgacgcaaagcccggagaatttcaagggcggggcaatctggagcgtgatgacgaacatcaacggtggactgaaagccatcgggtacggcctgctggttctgttctttgcggcagggctgataaaaacctgtgggagcttcacggatatgaaaaagccggaacacgtagtgaaagcctttatccgttttgcactggcacagggagccgttatgtccggcatggagcttctgactgcgatcttttccattgtgcagggcatcgtgacaaacatcatgtcccactccgggatggcagggggaaccgtaacggaactgccctcggagatcgtggacaagatcgaagcggtcgggatgctggaatccatccctttgtggatcgtaaccctgttaggcagtctgctaattaccgtgctttcctttgtaatgatcctgaccgtatatggaagaatgttcaagctgtacatgtacacggccatcgcaccgattccattggcaacctttgccggggagccaacccagtctgtaggaaagaactttatccgttcctacgccggggtatgtctggaaggagccatcatcgcactggcctgcatcatcttttcggtgtttgcatcaagtccgccggccatcggggacaccagcctgtccgccgtgaccattgtctggaattacgtcggggaactggtatttaacctgctggtactggtcggggcagtcaaggcatccgaccgtatcgtaaaagaaatcatgggattataggaggcgaaaaaaatggaagaaccaaagacactgagctacgactggcagtatggccgggaggaattatttctcagggtagacagttacatgagcgatgacaatctctatatcgggctttaccatatggaagatggatacccggaaagctttgcagaccttacggtaaacctgccttttgctccgctgggcggtatcaatgaagcctatatcgaccacaatttcagtaaagaaaagcttcgttttataaagcagcataagctgggaacgatacagccggataccgcatcctccggttactgcattttccagagggttgcattcgacctgaaaaaactggcagagcttgatccggaaggaacaaaaagatttatggaaagaaatggcatccggcaaagggatgtaccaaaacagaaacaaaagaaaaaacagagattacaaagagaaaggtagaaaacaacatggaagtgaaaatgaataaagaaatccgagactatcaggagtcaatgttctggggcttaagcttccggcagtgcttattttcggtactggcgattctggcagcccttggtatttatttcctcacccggaaatatgccggggaacaggtaaccggatggctgtgcgtgcttggggcggctccctttgcagcctgcggctttttccgttaccacggcatgacggcagaacagtttgcatgggcagtcatcaaatctgaactgctgtatccgaaaaggctggtattcaagtcggagaacctgtacttttcctgcatggaagagagcctgcggctgggtgaaaagatgatgggaaacggagcggagcttctggagaagaagcggacgaaacagaagaaaccaaagaagccaaagaagccaggaggaaggggtgatgcctttgattaaaaccttgagtcagacactgaaacaggacaaagaaaaattcaaagtaccgaggtctgtccagcaggcgatcccgatccgcaagatctggccggacggtatttttcaggtggagagcaagtattcccggacattccggtttacggatatcaactattccattgccagcaaagcggataagacagagatgttcctggactactccgaacttttaaatgcactggattccggctgtacggcgaagattaccctgaacaaccgtaagatcaacaaggaagagtttgagcagtccctgctgattccaatgaaaggagatggactggacgagtaccggaaagagtataacgatatgctcctttccaagatctccggtaccaacaacagcatttaccaggaacgctatctgaccgtcagcgtccacaagaagaacatcgatgaagccaggacatactttgcccgtgtgggaacggatatcatcacccatctggccaagctgtcctccatcggggaagagctggatgcagaacagaggctccagatcttccgggactttttcaaggcagacgttccgcagagctttccgtttgacatgaaagcctttgcgaaaaagggacacagcttcaaggactggatctgcccggacacgatggagttccacaacgaccatttcaagctgggcgagcagtacggcagagtcctttttatggaagattacgccagctatgtgaaagacgagatgatctccgaactgtgcagccttggcaggaatctgatgctgtctattgacatcatcccggtaccaacagatgaagcagtgcgtgagatccagaatcgactgctgggcgtagagaccaacgtaacgaactggcagagacgccagaatgcaaacaataatttttccgccgtggttccctatgatatggagcttcagagaaaagaaaccaaggagatgctggacgacttgactaccagggaccagaggatgatgttcggtatcctgacaatggtacatatggcagaaagcaagaaacaactggattctgatacggaaaccctgtattccattgcgagaaaacacctctgccagatggcaactttgaagtggcaacaggtcgatggactgaataccgtcctgccgtatggtctgcggaagatcgatgcggtgcgtacccttaccacagagtccactgccgtcttgattccgttccatacacaggagatcatgcagccgggcggcatttattatgggcagaatgcagtcagcaaaaatatgctggtggcagaccgaaggaagctgttaaatggaaactcgttccgactgggagtcagcggttcgggtaagagtttttcggcaaaagaggagatcgtagaccttgccctttccacggaagatgacatcctcatcctcgatccggagtcggagtttgcttctctggtggaagccttaaacggagaggtcatccggatttcggcaacctcagatacccatctgaatgcactggatatggattctgcctatggcaatgaccgaaatcctctgattgaaaagtcagaatttatcctttccctgtttgagcagctcgtaggagccggaaacctttcggcaaaggagaaatccatccttgaccgctgcaccgcagatgtgtaccgggattacatgaggggcggttacaaagggcaggtgccgaccttaaaggacctgtaccgacaactcatgctccagccggaggaagaagccagagggctggctctgtcttcggaactgtttatcaatggcagtctgaacacttttgcccaggaaaccaatgtcaacacgaagagccgtatcatcgactatgacatccgggagctgggcgaacagctgatgccccttggcatgctggtcacactggattcgatttttaaccgtgtgatccagaactggaagaagggaaaaacgacatggatctttgcggatgagttttatctgctgttccgctatgaatacagtgcggactttttctaccgcctgtacaagcgtatccgtaagtattccggatttgtaaccggacttacccagaacgttgaggaacttctgaaatccgataccgcccgcctgatgctggcgaacagtgagttcctgatccttttgaatcaggctaccaccgaccgggatgagctggcggcacttctgaatatttcagacaaccagttatcctacatcaccaatgtaggtgccggccacggactgatccgttgctccggaaatctggtgccgtttgaaaactcgtttccaagaaatacaaaactgtaccgcctgatgacgaccaagccgggcgaagcgtaagagcagtacagaccgggactggaggtgagagatgaaggatatcaaaaccaaagaagtcacaacaaaaccaaagactaaaaatcctgcctccagaatcccgaaggagctgatgcggacggccatactggagagcaaggaaaagtcccagaccatcgcaaatgccagggataatgacatgggggaacagtccccatccgagtatgccagtggaaaagtcgcatccgcagaggaatgggctgccagaaagtctggcagaactgtaaccagcgccggaaagacagcagcacagacttcctacgagaagatcaaactgagagttactggcaaaaaagaagcggagaaagaagctgccagaggaacaggggacacacaggctcccgatccggtcagtcgggaagcaccagagcaaaagaatcgggaacagacatctgagaacgtgaagattaaaagccgggaagctcaggaagcacagatcaaagatgtccagatccagaaagccaagcggcaaaaggcggtttcagatgctgtcaaaacaaaagaacagaaaattcgggtagccagagagacaccgagaatccagaatggacaggaactatcaggaacgaagcagttctccatccgagaccagagccggaaaaaggcagtcgcagatactgcaagacagaatgccatctgccagaaacagccggaaaccatccggatcaaggaaaagccacggaaacagttggagccgaagaccatacagcggcgtactattaagaccgcccctccatctgcgaagattagcatccagccagagcagaagctccgtgtagccagttccaatgccctgacaacccggatgcagaagcagatggaacgaagggcagcgaaacaggcggcgaagaaagcagccttgcagacttctgatggaatccgtcggatacagaaaacggcaagggcaggggagaatacattcaaggcagctagagccgccgtggaagtggtagcgaaaaccgtgcagtccatgatagctgcactgggagccgccggagcggtcatggttctgcttctggttatcatggtcgggatcattggcggtgcggcattctctggaagctcagagagcaacgaagcactcagccaggaagtactttcctatacggcaaccatccagaaatacgccaaccagtatggaatccccgaatacgtttccgtgatacaggcaatcatgatgcaggaatctggcggccgggggaccgatcccatgcagagcagtgagtgcccatacaacacccggtattccaacagcccgaatgccatccaggatgcggactactccatacaggtaggaatccagtattatgcggactgcctaagagaagccggatgcaccagcccacaggacatggacaagctgaagctgtccctgcaagggtataactacggaaacgggtacataacgtgggcgattcagaaatatggcggctacagtgcagaaaatgccctgcagttttccaatgagcaggctgcttcgcatggctggagtgcctatggtgatccagaatacgtccctcacgttctgcggtattattccagcggcggattgtttgccggcttgtttggaggcaacggccagatcgtatccgtggcactgactcagcttggaaatcagggaggccagaagttctggtcatggtatggatttgacagccatgtggcgtggtgtgcctgctttgccagctggtgtggggatcaggcaggactgatcgaaagcggcaagatgccgaagttctccctgtgcgatgacggaatcgcatggttccagagcaaggggaaatggaagagcagaggatactcgccagcacccggaaccctaatcttttttgactggaacggagatggaacctcagaccatgtaggaatcgtggagaaaaccgagggcagtaccgtatacaccgtagagggaaactccagtgatgccgtgaaccagagaagctacgatatcaataacggaacgatcatgggatatggtatactttgaaaattaaaatagaatataagttataacctatgaaaagaaatttgatatgtgtaagttgatttttttatttgattgaaattttaattttatatgaaatgaaaagaaccagtgagagaatcgttaaatttcactcactggctcaattcgtttcaaatttctcggacaactctgtcagttctttcaccgtttcctgggtgtgatgcaacagggtgtcacgcatttctggcggacagctggaataaagcattttcatctgattgacaccctcattctccagagaaatatctggatttataagcgtatctaaagagatgtgtaggacctttgccaatgctctcaaaatcaaataggaaggattcattttccctttttcgatattggcgatttgctttacagaaacatggctcagatcagaaagttcttgttgtgtcagttctttattctttcgggcttcccgcattttctgccctaaagcagttaaatcatcaatcggcataatcgttcacctcaagaatattgtatcgttccggtttgtacaaaggaataaccttattgtgcttgctaagaggtatgattatgctgattatgtgaatgaaaaacttctgttcagatgaagttacactatcttagtgacaaacgcaaagtgcagggagatatttgatggcgcattccgtagatgttttacacctaatcaaatgtggcgaggatgtggctgaaaaaaattacgagcgccagagttccctctggcgctcattttactttcgctgtgcgttttttctgtactctaatggcaacaatcccgtgctttttcggaataattctgcaaatcggcttgaagtggaatagcctactgtttgggcaacttgcccgactgtcagctctgtatatgccagcagatattctgcttggctcatgcgccgctgttgaacatattccgtgatggtgcagtcgtagtatttcttaaaacagcttttgagctttgttgttcccatgcaggcaatctgtgttagccgttccagaggaatatcaaaagcatagtgatcgctaagataagcggcaactatttggagattttcaatatcctgttgagagagcttatgggctggtttatcaggatgtttcttctgatattccaccaccattgaaacagcttctgcgactttaccctcataaaaaagttttgctgcaatcccttccccgcgatagtctttgatttctgtgagtaaccgtgacatttctggaaagtcggatgtttggtcgatcttccgaaatgcatccacaggattgatctgtgcctccgggtacagttttttcaggtagtcctcataatatgccggtgcaatctcaatcccaaccgaacggattggaatatttttatgtatcaaagccttgtatggagcgtagcctccaataaatgttttgatacaaccggcagacagtctacggtatggagataattcctccccggaaatagagtcataccgagtgatactcagacattccggcatggagcattccaacatgaaatcttcgtggaaggaaaagttatggattttaatatcatataagtctttctgtccataagtccagtaggtgccttctccaacttcgggagaaagtttccagcagtcacctaatgccccatattgctggttgtctgggtcacggataaaaccgtgttcaatcagtagcggtgtataaaactggtcaataatttcagacatgaaaacagaccgcctcctttttgcaacgattagacgaacttttgaaaggaacagacgaacattgccggaacctattgaatgttgttcgataaatgcgtattgtattaggcgaagattagaggtatctaaccgaagaatatcacaaaccacttgtcgagtcaagacaatgaaaggtaggaggtcaaaatgagtaatcaagtaaattctatgaacaaaggtctgacagtgaaagaccttgtaacaacaggtatttttactgcactgttatttgtttttgtattggtgggcggtgtcttttttgcaacgaatcctgtacttacttttttcatgccagcaggaggtgggctgcttgctggccccatttatcttttgctgattgcaaaagtacataagcgttggagcctttctataatgggcgttatcatgggtattatttggttcgtgactggtatgcactgggcttttgcattgggctacatgatcatggcgattgtcgcggactttgttgctggtgcagggaagtacaaaagcaaaaaactcaacagcctgtcttatatcctgttctctctcggtggcactggttcatatatcgtgttctttgttgaccccaacggctgggcgcagaccatgctgggaaacggaactgaacagagttacatcgacaccatgcaggcaactgcaaataccggcatcctgattgccatgtttgctgctgttatcattacatctgcaatcagcacttttgtaggctgcaaaatgctgaaaaagcagtttgaaaaagcaggtattacagcatgagcggtaaacgccacaagaaagagctttggctcgacccacgggccaagctctttcttattcttatgtgtgttttatcgtccatgtttgcgccctcacttgcatatcaatttatccttgttatgctgattgcgatattgggggctttctttggaaagtggaaatatgtcattaaggctgtatgcttttatgcggtcatctgtgccctgacaatttggatcatggcagaaatgacaggcacgctgcggacaatgtttattgcctttttaggcttgtttcataaggtctatgcgtgcggaaccttggctgggattgttctgactactacaaaagtcaatgagttcctgtctgctatgaaccgtgtccgcgcacccaaaaagttagtaattcctatggcagttatgctgcggtacattccaactattcaagaggactggcgctatatcacagacgctatgcggatgagagatgtttcaccatctctggcgggctttttaacacatccgggcatgacggttgagtgtatttatgtacctttattgatggcagcttcaaaagcggcggatgatctttctgttgcttctgtcactcgtggaattgaaaatcccaatccacgcacctgtcttgtccagataaaatgcggaattgccgattggggcgtcatgaccgttgccgtagcttatctgatttttgaattatgtgtgcggggaggtgtgatcggttgattgagtttgaaaatgtatcgttttcctatacgggacaggaacatggtgggctacgcgacatcaatttgaaaatttcggacggagaatgcgtcctgttctgtggccgcagcgggtgcggaaaaacaacgattacaaggctggtgaatggactgatccctcagttttatcagggggaacttcatggccatgtgctggtagatggtcaggaaatcagcaatatccccatgtatcagattgccgctaaggttggctccgttttccaaaatccacggacgcagtttttcaatgttgatacagacagtgagattgcctttggaattgaaaatgaagctcgccctcccaagaaattggctgagcgagtagagcagacaactgaagatttgcatattcaaaagctacgaaacaggaatatttttgagttgtccggcggagaaaagcagaaaatcgcctttgcttctgtttatgccatgaacccacagatttatctattggatgaaccatcctctaatctggatatgacttcgatccaggaactaaaggaacatttgcggctgataaaaaaacagggcaaaacggttttgatagcggaacatcgtctgtactacctgatggagttggctgaccgaattgtttatctggaaaacggagaaatcaaaggaatatacaccccggaagaatttcggcagctatctgaacctgatcgtgaacacatgggtctgcgagctgttgatctacaggcggtattcccgccaaaagcccacttgcctgcgcctccccctgtattggagctgcggaatgtgacgctccgttacaagaagcaaacaattttgcatgacattgagctatccgccggaaagggcgaagtgattggtgtggtcggccacaacggagctggaaagactacattttcccgcgctctctgtgggcttcacaaagactgcgatggacaatttttgtgggaaagcgagccgattgagcgtaaggaaaggctgaaacgctcttacatggttatgcaggatgtgaattatgaacttttcgctgacagcgtggaggcagagtgctcctttggtatacgcaatccagatcaaaccctggtaaatgcaactttggaggaattaggccttacccaatatcgggagcgccatccaaacacgctttctggcggtcaaaagcaacgagtagctgtagctgttagcatgatttgtgggaaagatctgctggtattcgatgaaccgaccagcggccttgattttgacagtatgacgcaggtggcgggactgatccgacggttgtccaatatgggaaaggttattttcattgtcacccacgattttgaatttgtctgccgtacctgctcccgtgtcctgcattttgacgaaggcgaaatgcccgatgatgtaccagttacaatggatgccctcccgaaattgagagagctgttctctgtttcagatggaaaggagaggtgatctatgaaacagaaaaaagaaaacagagtagctttgctgctccactgggccggtgagcaaaaaatctggctgttcctggcaatttttctatcggcggtcagcggtctttgcattatcgtcccttacattggaatttaccggctgatggacgccaccttcaatcatacctgcacgcaggaacttgttgtacataccgtggtaatgattgcagtggcggtaactttgcggtttgtcctgtttggctgttccggcgtagcagcccacaaaggggcctatggcgctcttttcaaagtgcgctgcatggttgcagaacacatggccagagcgcctttaggggccttgaatgaacggcgcaccggggacataaaaacggttctgaatgaagatattgaaaagttggagctgtttctggcccataaccttcctgaccttgtgtgctatctggtggggccggtagtcatctttatttatctgatgaccgtcaatattcctctggcattgatttccctggttccgctgatccttgctgttgttgtaatggggatgatgttccgcaatacggatgacctgatggaacgggccaatcactccattaccacactgaactcggttatgattgagtacatcagcggcatgaaattgattaaagcctataacatggggagcaaatcgtttcaaaagttttcagacgctatccaggaagaaaacgccatgtggaatgaaacttcccggcgcatggggccaccttatgcggcctttgttgttatcatcgaatgtgggatgttgatgatggttccaatcggcggaatgtttttcctgaaaggctcactggctgccagcgcatttttgctgttcgtctatgtaggttccatgtatctgacggaaatacgccccctacaggaactggggactaattttgccaatgtgctgaacgctgttactaagaccaaagagatactggatattccaatttatgagggtggagcggactttccccaaaatcacgatattgaacttcggaatgttcggttttcctatgatggcaagaccgatgtactgcaaggcgttaatctcaaaattaaagatggtgaacgcatggcccttgtgggacagtctggtgccggtaaaagtaccgtgattgagctgatctcccggttctatgatgtgcaggagggcgaagtgctgattggcgggaaaaatgtaaaggaactcaattatgatactatcctaaaaaatgtcgccattgtgttccaaaagaccttcctgacccgtgacagcgttttagaaaatatccgcatgggcagtaacgccactctggaaaaagtacggaccgccgcaaaagaggcgcagattgatgatttcatcatgtctttgccggatggatatgacacgaaggtgggcagcttcggctctcgcttctccggcggtgaaaaacagcggattgccattgcccgcgctatcctgaagaatgcccccattttgatcttagacgaggccacaagcgcctctgacccggaaaatcagatggagattgacaaagccattcaaaatctctgtaagggaaagactgtcattgtggtagcccatcgtttgagcgcgttgaagatgtgcgagcgtgtagcagtggttgaaaatcacacaattacctgtgtcggaacccatgaggaagtccgaaagaacaatgcttactatcggaaggcgtgggaggactacgaaacagcccggaatattacttatcagttggagggaggcgagcagcatgagtgagcatgatgtattgaaaaagaaccgtaatttttatattggcgttggcgggactgttctggaagggcttctctctggcagcctgtttatgctgctttactctgtcatgcagtttttgtggtcgggacaatttgacatgaaccgtgtcctggttctgacctgtgtgatcgcggtggtttttcttcttcgtatcctgatttacagctatggctataccaaagcgcagattggcggtgcagcggtcagcaaaaatattcggctttttatgggcaaccatttgaagcgcatcccactgtctcgattttcgcaggggcagaccggcgattatatcaacaccattacaagcgacgtaaacaactacgaaaaaatcctgacccataaagtcggagatttcgcaaagaattttgccctgtcattgatgttgattgtctttgttatgacgctctatgttccggcaggaattatcctgctgatagccgatcttcttttaatccccggcctatggctttctttccgcatggtacggaaatatggaaaagaaaagaacgatatttgtgcggagaacgtcagcagcattgttgagtatgtttctggtattcagactttccgagcttatggtgtaggcggtatgaagaacaaaactgttatcaacgccatgcgggagttttcccggatcagctttgtgtacgaatcaaaagtgcttcctattggtgcggtctttggtattttgagttggctgtcctgcccgctggttatcttgctggcctatgcaccctgggtcgcagggacactgagcacggtggactaccttttgatttgtatgctgcccctgttctgtgcaaagctggctaactcgatttttgtagaccttaccagttataagaacctgatgatctcgaaaaacaaaatcttgagtgtaatgaatgagccggaggaaactggcagcatggagccgcttcacacagctacccatgaaatcacatttgacaatgtagattttgcatatgttcccggtgaaccgatactaaaacacgccacctttacggtgccagatcaaaagctcacggccattgtcggagactctggctccggcaaatctactattttgaacctgattgcaaaatattatgaagcaacgggcgggacgatttctattggcggtaaacccattaaccatgttgccgcagagcgtgtactggagcaagtttctatggtagaccaggacatatttctttttgacgataccatccgggataatatccgacacgctcgtcctaatgctacggacacggaaatcgaggctgcctgccgggaggctaactgtgacagcttcatccgtaagatggaaaagggatacgatacgccgactggcgagaatggaaatcttctctctggcggtgagcgtcagcgaatttcaatagcccgcgccatcctgaaaaatagccccatcctgcttttggatgaagcaacagcatctcttgacattgaaaatgagcttgccgtaaagcaggccatcgccaatctgctaaaagaaaaaaagacagtggtaatgattgctcataccctttccattgtcaaaaacgctgatcaaatccttgtaatgggtgatggcaggattgctgaatctggaacccatgaggaattgcttgcgaaaggcggaaaatatgctgctatgtggaacgcagagcaaaaaatatcagcttgatgggaaataagatgtctgtcggatcgaatatgatattagcacagaaacctatgaacgactgaaagaatcagtcacgaaagaataattacatagcgcatgaatctgccccgattaaggggaaagaaaaaaccgttggttggggcaggtaattttgcacactcattttaagttattaccataacggcggttttgagaaatcagagccgccgtttctttgcttttacacaaaccaatgacgacttccagggacacggtagccgattggaggttaatttatcgtgccccgtttactttgtcaaagctcacatgatctgcatcagttaaaaaaattattgttcttcgttcgggcaagtataatattgcatcggcattatcgttctatgtaattcagtataataatggctgtttttggaatgccagttttccattgcggaaatttggcgtttttgatagccgtttttatgatgatacttttagagtatatcgctgtcgatcaccgccacactccgatttgatttcgcaaaaattcagatcggaggaaaagataagtggcttacaataaagcaaaagaagaatatagatggaaccagtggaaagcagaggaagagaagatcctgcgtgaacagggcgtggatgaagagacgatccagaagcttcgggagtatgactgggacgatttcaatgcagagcggagattccgggaacaccagacctcgcttctggactgtatggaactgctcctggaagaaaaagaaaccaaagagtcccagccggagagcgtagaagccctgctggataccgtggagaacgaagaactgcttcagatcctgttatcaactgataagaaaacccttcagatgattgtcctgaagatgatgggatatgcaccaaaagagatcagtcatcacatggaactgccggagcagacggtttatacaagactgcggagattaagggaaaagatcaaaaagtccatgaaatttgaataaaacaaaaggttctcatcggctgactattagaacgaacagacaggaggattaatacgatggatgagaaagaagtgtccgaaatgcaggaagaaatgatgacggtactggtagtcgagccgatgaaagcaccctatgtcaaaagcatccccaatgagctggaagatctgcagcaggcagtaggcggtgacattgagatgacttatccgtttgaggatgaggttggaattcttttaaacggcaatggaaaatttgaggggttgccgttaaatcgggcattgtacgatgaccgaggacaggtctatgatgccattgccggaacattccttgtggtaggactgacagaagatgattttacttcgctgacaccggagcagattgaaaagtttaaagaaaaatatcagtcaccggaagttttcaccctgtttaacggggaacttcatgtgatgaagatgccaccgcaggaacaaaaagagcagaaggaaagtcggaagaaggatgcacagcagaagaatccggcaaaaggaaaaaagaaaaacagatccggggatgcaagataaaatatttttttgtgaagtgaataaaaaaatacactgccatcggctagtaagcagagggacatccctcggctgttctttggcaagtgaatatcggcactacaggtacgttcccaaccgtagaagcgtgacagtatgagcgccatgattaagtatagggtaaagattcttagacttggagcgagaaagcatagctgtgaataaggcggtggcagcctttcgccaggatcacggacgggggataatgatacacgttaccagccagagagcggaagatggactccgggttgtaatcagaaagacccccaggacatctgtgagcggcggcaggccagccgcccgcctgtagtgtccccttccccagaagaaatacagggatagttccgggggtgcgaggtcaaatgcggaacagcaagataaaaaagaaatcaatgaagaagtgtgtcgttgatatcagataccatgcggctgtgggagactacagccgtattcttgtggtattaacgtcacatcaaggggagagaacagatggaagaaacaaaaagaagtggaatgagcaaggatcaattctggaatctgattgaaaaagcaaaggaagtgtgcggcaccgatctggatgcttcggcagtgtggatcaagcagcagctcttctatatgacaccggaggatgtcctccaattccacaatcttgtttacagttaccgggatgcggcttataagtacggcttatggacagcggcaggtattatgatggaagcagggtgcagtgatgacagtttttccgattttcggatgtggctgatcgcccagggaaaagaagtttatctgaatgccttaaaagatccggattccctttccggcgtgactccgtatgggtactgtagttttgaagcgttgggatacatctcatcgcaggtctacagtgccatgaaagggaaaaatatctatcaggacagtacggcaagaatgcagatggaatgttatgagcaggtgatccgggatattgtgtaccatcccatgatcgagtatccgctggaattaccggaagcaatggtggtatatccgaaactctgtgaatgtcatttgtccgagcaggtaaggaaagctcctcagaaagtaaggacatggaatgtttcccggacggatatccgaaggatgatggcaagagggaatgctgccataaagaaaatgcaggaacagggacagaatacaccggaagcgaccagacccgtccgtaagggtacggtaagataagctttctggcaaggagaagtaatgtgttataaaaatgaatatcagaaaagggcacatggtgaagtggaacagatctttcgggagcttctcccggaagccgggcttcatgtaagggaagaacagatccgtctctgccatgaaatgctggatgcccttatgaaaaatgaaatcacgctctgtgatgcaggagtcggcatcggaaagacctatgcctatctgacagcctgcatcctgatgcggaaatatagtgtactgcattccggttattcgggatgtgacaggcggtctgtagtggtatccacttccagtatcgccttacagaaagccatcatagaggaatatgttcctttcttatcggacgtactgttaaaagcagatctgcttcagggagagttaaaagcggtcgtccgcaagggaaaggaacattttgtatgcgattacaggctggcccagagattagaggcagtccgggacaagaataaaaatcaggcacagatggaggcattgaagtccctccggcataattttgatttagattccgtacataacctgagcggttttgaccgcaggctggtgtgcgtaccgaaattctgccccagggaatgtccggggaaagcaggatgccgttatcagaagcatctggatatttccaggaaagaggatatttttttacagatttgcaatcacaattatcttctggcagatgccatgcaccgggcaaatgggtaccgtccgcttctggcagattacagggctctggtcgtggatgaggcccataaactcccggaagccgccagccagatgtatggaagaagcattggaagggaagatgtgcaggagattgcttactttttagtcagagagcataaaggcacggatggaaaacggctgctggaaggggtttccgctcttcagatggagattcgaaagcaccggaaagatggcatcgaggacatggctggaaaagaaagtttttattttccgccgggagctggcacagccttaacccagatgcaggaaagacttcagcttatgattaaaaggctcgccgggaatattccttactggactttccggcggctggaagagatggaagagctgttcggctggtttttaaagaacgacaaacggtatattttgtttttacagcaggacagccggggacatttaacctttatggcagtcaaccgggagatcccgaagtatctggacgccaccttatggagccggggatttccggcaatcttaaccagcggcaccttaaaagccgggaacggttttgcaaggaccagacagatgaccgggctggaaaaagaaacaggtgtccgggagtgtgtggcagaatccccattctgctaccaggagaactgtctgctttacatcccggagcatttaaaaccaagaaaaaaggggagccgggaagaggccgagcagcttgccgggcagatccgtgatctggtgtgttccacttacgggcatacgctggtactgttcacatcttataccctgatgggaaatgtgcagcagcttttgcgggatcagatcccgtttccgatggtgcaggtatggagaaactcccaggaagagatcgcccggtttaagaagatggagaatgccgtgttgttcgcagccggctcctgctgggagggtgtggactttccgggtgacatggtatcgtccctgattatcgtaaaactaccgttttctgttccggaccctatccatgaagcccagagggagcagtaccgatcgctaaaatcctacatccagaccatcgtggtgccagatatgcagaagaagttgcgtcagggatttggccgggcaattcgcacggagcaggacacctgcgttgtgtctattttagatcaccgtgccacgaaaaaaggcaggtatcggagtgatgttctggaagcactgccaaagtgccagagggcagaacggatcgaagaagtagaagattttatccgaagccggaaagtggagcgttactacagctgagagcatccgtggcgttgttggttctgcccagatccgggtagcagacaggacaaaaagtttagtggtatttcaggggcggtttggagcgaattggtagtattggtgatagctttatcggcatgagttgggtatactgtgtatagcgttagaggaaaggaagtgagcagaaatgagaagatatgagctggaaacagaaagagaaggctccaccgtttatttctttatcagagatgtggaaacactggatatcgtcctgcttccaaccaaatatctgatgcacaagatacggaggaaatgttcaccgaatacggtgcggcgctccgcacttgcaatcctgtactatctggaatacatccatgaaaagaaaaaggaattgacagacgtatatcaaatgccttatgttgaacagacaaatcactttgtggaatttttatactggctgaaagccgggaagcataccagagataaaaatcacagatctccaaacaatggaacctgcaacgcatacttaagagatgtgttcaggttctatctttttatagaagaagagtaccagcagttcggggagctgaaagtcctgtcctataattattttgtagccgtggatgcagtaggcgtaaagaaaagcatacgatcaaagagtttcaaaggctatttaaaagaggaagagcataaggcgagagcagcaaagaaagatgaaattgtggaaatcttgaaagcgtgtaccaatataagagatcggcttctcatgctgcttctggcagagacaggctaccgaatcggtgagatcttaggaattgattacagtaaggacattgattatcaaaaccacataattcgggtatatttccgtgaggacaatgaaaatggagcgagagcaaagaatgcagaataccgaagtgcgaagatcagcaaagataccttcggctttttaaatctgtatatcgcagagtaccgaaaactacttcagcaccagacaagcctgtttgtgaatatttcaggggataatagcggaaaaccaatgaacgtggaagcagtatactctatgctaaaaagaatggataagaaaacagggattaagatcacgcctcatatgctccggcattactttggaaatgagcggagaaaagcaggatggtcgctggaactgatacagctggcctatggacaccgccacatccagacaaccatcaattatctggacattgtggatgatgaactgctggatgccagccaggaattctacgagaaacactcctccctgtatgggattgaggaattgctataggaggtggtttttatgcctgcgtttttacagtcttttatagaggcagaacaagaacggagcaggcggattgagcagctacgaaaagaaatccgggagtttgcaaaagaggaagcaggaagttccattacagaacagattctgctgtttctggcagatgagatggtagaacatctttcggaaatagattatgaactgcgaatgaaatttgaattatacataacaccgctgataaagcgaaattacatttaccgatataccggaacgttcgaccggatacggcaggcgtacatccgggaacggatgaaaactccggctggacagagggaatgtgaatggaaatataaaaatgaaatactttttgttccataccactcagatcctgtaatcgtaaagagtgtggaaacggtacggtgtcggagtaacatggtctggaattttaaagcggcagccagtgagaaactgaaacgtcagatttttaccgtgctggaatatattctggagaattatgaaatttccagactgagggaatataaactgaccgggttacagcttttttacgaattttgcatccgggagcagattacagatatccagcttctggagctggaacaggaaacagcatttcaggactacctgaagcagaaagtcgagaaagagcaacggcgaaaacgactgaagagcattgtggaaactgcccgtaaagtgatttttatagaaactgatgaaacaagatgggatgctaccatctggtatttagagcggtttcgtattgccaaagaaagaataaaccagagtgacagtatagaaaaaatatcatttcaggaagttctacagcccaagaatcgattgctgcttcaggaatatatgaagtacgaaattggaatcggagaactggcgctcagtacggtgtacgaaagattccgaaccattcgaaattttttgcaggagatcagcgaactggaagttaccaagtgtgatgccagcctgattgatgtatatttaaagaatttgcagaatggtgctatgggagcaaagacatttaataccaatgtttcgggaatacagttttttatgaaatttctggaagtaaaggggtatataaaaaaggttccgttttatgcatcgtattacttggaaaaacagatcccagtccaccatgacagaagtgtggaagaggatgtgtatatggaaattatccaaaacctctcacagtttcctgaacacctgagaatgatgtttttacatctctggtgtgtgggactccggatcagtgaggtctgcaccttaaaaggggatgcgtattatatccagaatggtgactgctggatgaaggtctaccaggtgaaaatgaaaaattataaaagggttcccattccggtaacattgtatcgtctgatgcaggtttatctgaaaaaacaccctaccgaaaaagaagcatacatttttcggaatcggaaaggtggagcattttccaaaagcaccttcatggggcagatgaaaaaatactgctcccagataggcatacagaatggagaatatatttttaagtctcatgattaccgacataccgtagcaaccaatttttatgagcatggcgtatcaatccaaagcatccgggactatctgggacatacgtttgaggaaatgaccatgcagtatatagattatatgccaagaaaaattgctaaagaaaatgacgcatactttgaggaagaggaaaacagcctgcttgcctgtatgcagaaaggagagaagcatggataataaactgaaattccaacaactggaatgttataagctggctaccgatgagcaaaaggaaaagctgaataaggaacaatattttgatctggataaactgccgggaaaccagcttcagacagaatttgtcgaatacatttactaccgtggaacgcaggtatccatcctgaccataaaaagggaaaggcattattttaacagcttatgtgaattttttcagaagtcatcccatcaggaaaacagcctgcttgacagagaaaaagacttctggataaagcagttgaaaatgtggatgatacaaaacggtagggctttgacgaagcataaagtgacgaacattcagactgaatcggtggaaaaagctgccctgatccggtattttgaaagccttctggaatttacactggaccgatcagaaaccaatgagctggcaaaggatatctggcatctggaaaggcttccgcttatcctgcggacaaatccgattgtcaaccataagacactaaatttcagaggaatccggcaaccagatattcgggaagaagtaaaaaaagcaatttaccatcatctgaaaaccgaagcccttggcagtataaaacgtgaactgtccgccatgaataaattttcaaagtatttggatgaaaagcattccaagatcagcacctgcgaagagattgaccgggagatcatagaacaatttttaatcaacatcaaggtagaatcaaacggagggaatggcatccgggatgacctgctaaagcttcgaaatgtgctggaaacaatcggaaaaatttatgattttccacatcttacaaaactgtttttaaaatctgattttccgccagaacggaaagcagaattcaaatcttattcggacagtgagctgaaaagactgaatgcccagattgtaaaaatggaagagcagatagcaagggcaatgatcatccaccagatgcttggaaccagaatttccgacacgctgaccttgcggaaagactgcctttataaacatgaccgtcaggatatgattatcatataccagccgaaaacaagaagatatgaaaaaccgatcagccgggagctggcacagctgattggaaaggcagtcagttatgcaaatgagcattatcctgaaagcatttatatctttgcggacgagaacaaaccggagagaccaatcagttaccaaaccttgcaggataaagtgcttcgaatgatctatgaaaaagatatccgagatgacagcgggaaattattcggatttggaacgcatatgttccggcactgttatggggtaaagctgacagaactccatgtggatgattggaccatagcaaagctcctgggtcataaaggagtgaaaagcgtccagtactaccggaaaatgagcaatcagcgactggcagatgagacaagggaagtaagaaatcttatgtcacagattatcttagcaaatctggacggatggggagaagaatatgagcaaatacgacaagatgctggaattgaataaaagaaagagcgaagaaaaagtggaacgggcagtcctgacaatacggacaatggtgttggagagagaaaaggtgtccgtaccagcactgatgcaaaagactggtttatctagaggattcttttacaagaatccgattgtaagaggtgagattgatacagcaatggaacagcaggctggtatggtggatccaaggagaaacattatcagtcaggcgatggaagcggaaatgaatctgctccggcaacagctacagaaactgaaaagcgaaaatgagaatctaataaaggaaaaccagaagttaaaaaaagcactatccaagaaagagttgaatcttatcaaacagatttaagctatatcataatgcaaagtaggtctgccagaatacagcagatctgttttgcattgtgatatagaaacagattatgcttaaaaggcattaagcaacccataataatgggtattggacatagaaagcaatatgggagtatgatgataccgataagaaatagagtgtacctgaaatgcaaactgtcacagaaaaattatgaactttatgtaaaaagttgcaaaatctattgacctagagcttacttcaggttgtaccataaaataaaaagagcaaggaggaattttttatggatatcgaacagatgaaaaaagacttaggtggaggtaacgtatttccaatcggtgaagaaaacgtagcattcgcaaagtattttacaggtgaatgctatttgaatatgcttacaacagagagagtaccagttggtctggttactttcgctccgggaacaatcaatgcataccacatccatcataaaggtggacagatccttctggttactggtggaagaggatggtaccaggaagaaggaaaatcagctcgtgaattgaaagctggagatgtagtaaatatttcaccagaagtaaaacactggcacggggcagcgaaagacagctggttccagcatctggctgttgaagttccagcagagggagcttccaacgaatggctggagtttttaccggaagaagagtataacaaattaccataaataagaaagatggaggtttgatatcatggcaaagattacacagacagcaggaagaaatgctctgggaacatttgcaccggagtttgcacatttcaacgatgatgttctgttcggagagaactggaacaatgaagatattgatttaaagacaagaagcattatcacagtcgtagcactgatggcacagggaattacagattcttctttaaaattccatttacagaatgcaaaggatcatggagtaacacagaaagaaatcgcagcgattatcacccacatagcattctatgcaggatggccaaagggatgggcagtattcaaccttgcaaaagaggtttggaacgaggaagaaatagaaaaataacctggtagaaactgctcgtcagaaaagattcgcacaaagcacaaatgtgtatgccgttaaagccagcaactacaagggattgcggagggggagtccagtttaatgcagaaataactggcacattcatcacaagggcggacagattctgctcgttacttatggctcaggctggtatcaggctgagggcgaaaaagcagtaaagctacacgccggagacgttgtcaatattacgccggaagtaaagcattggcacggagcggcaaaggacagtgtttttgtccatttggctgttgaggttccggccgaaggggcttataacgaatggctggagcctgtttcagatgaagaatttaataatttagtataaggagatataatatgaaatatataactttgaacaatggtataaaaatgcctatactcggttatggagtgtttcaagttaatccggaggaatgcgaaagatgtgtgtctgacgctattgaaacaggatataggtcaatagatacagcccaggcgtatcataacgaggatggcgttggaaatgcggttgaaaaatgcggtctgcccagagaggaattatttataacaacaaaagtatggatttcaaacagcggttacgaaagagcaaaagcctcaatagaggagtctttaaataagcttaaatcagattatattgatttgctgcttattcatcagccgttcggagattattacggaacatacagggctatgacagaggcctataaagccggaaaagtcaaagctataggggtgagcaatttttaccctgaccggcttgttgatttctgcaagtttaatgaagtggttccagcggtaaaccaagtggaaacgcacccatttttacagcagagaaaggctcgtgattggatgagaaagtacggcgttaaactcgagtcatgggggccgtttgcggaagggaaaaataatattttctcaaacccggttttaaaagaaattggtgaaagtcataataaatcggttgctcaggttattttaaggtatcttatagaaaatgatattatagtcataccaaagacaacgcataaagaaagaatgaaagaaaacattaatatttttgatttcgaactttcaaaagaggataagcaaagaattttggaattagacggaaccgaaagtttatttctgtcccattatgaccctgaaactgttgaatatttaacaggtttaaaataatataagaaaataaaatcccatattgtgtttttaaaaggctcggtaatgctgagccttttagcgtgcagaaaatagcggacttttaacccctagatcaatagggcctaaacattaaatttgtgtataatgccaaacactttatgctttgttaacaatttggtcgcttagcatgcagaaaaagcggtttgagaaaaaggttgtgcaaacaagtgagatttaatcagtctatggaactgccattgaagctgactgaaggataaaaacagctcaaaaatgctgtgcgctcatctgcagccacacatattcactttttagacgatagaggctaaacattaaattttgtgtataatgttaaacttttaataattttatcggcagtctgagcggctcaacaatatttagcggcttttaaacttgcaaaatagaatatgagtgatataatagttttaatttgattattaaaaaaggagaaattagttttatggaaaatcaccctatacctccggtgtatgataaaaattctaagatcctgatattgggaagtttcccttcggttaaatcaagagaaatgaagtttttctacggtcatccgcaaaatagattttggaaagttcttgcaggactgacgcgttctgaatgtcctcaaacgattgaagaaaagagagaatttttaattcataatcacattgccgtatgggatgttataaaaagctgtgatataattggttcgtctgacagctcgataaagaatgtgagtgtgaatgatataaaaaatataattgaaaattctgatataaaagcagtttttacaaacggaggaacagcgcataaactatataaaaaatatatggactgcgattatgaagcggtaaagcttccgtctaccagccctgccaacgccgcatattcactggataaattgataaatgaatggaaagtgattttagattatttataaatatttcttttctttgttaatatttattcagcaaataaatttatttataaagttaagataaaaaataattgtcgttaggtatgttttattttttaaattccacataagatgtttttatgtataaatttttaaacatatcatgatttatgttttgggattaaataaaaaacaatagttttattaaatataaattattttcaagacagaaataaaaattatatagagctgtaaaaaataaagccgcgatagtaaaccacataaaaaacttaataattgcgggaaaacggcgttctcttcaggcttttagccatgaaaagagcgctgtttttttgcagcatttttgaaaaagatagttttattacgttctattttttatttattagagttagattttatatctgttgaagcatattgaatttattgactgatttcggaaataataaaatgtaaaagcaatggtgcggaggaataaaaatgaaaaaatcagtctggacggacagtattaaattacctgagttcccaaaagcggacaaagaaatgaaaactgaagttttaattataggcggcggcatatgcggaatactatgcgcgtacatgctggagcaaaaaggtattgattatatacttgttgaaggaagcagaataggatatggaataacaaaaaatacgacggctaaaataacgtctcagcacgggttgatttataataagctgataaaatcagtcggacgtgaaaaagcccaaatgtatttatccgctaatgaaaaagctctaagagagtatagattaatagctgaaaatatagactgcgattttgaaacaaaagatgcgtatgtttattcgattaatgatagaaaaaagattgaggatgaggtaagcgcagtaaacagtctgggatttaatgcagaatttgcatctgagacaagccttccattcaagacagcaggcgccgtaaaatttaaaaaccaggcgcagtttaatccaatgaagtttttaaatgaaatagtaaaagggctgaatatatatgaaaatacttttataaccgatataagtgaaaattggacaaagtttgacggcggtaagatattggcagataaaataattgttgcaacacactttccgtttataaataaacacggcagttattttataaagatgtatcagaagcgttcatatgttattgcctttgaaaacgcagataatgttgacggtatgtatattgatgaagctgaaaacggtatgtctttcagaaattatgaagaccttttgctgattgggggaggaggtcacaggacaggaaagcaaggaggcaactggagagcggttaaagaattttcagaaaaatattatcctaaagctaaagaaaaattttattgggcggctcaggactgcatgagtttggacggaatcccatatataggacgttactctaaaaccactccaaacttgtatgtggcctccgggtttaacaagtggggaatgacatcgtctatggcggcggctgaaattcttgcagatttggtggttggaaagagcagtgaatatgaaccactgtttaatccaagcagaaatattttaaagccccagctttttgtcaacggttttgaagcagtaacaaatttgctgacgccgaccttaaaacgctgccctcatttggggtgtgcgcttaaatggaataaggctgagcacacctgggattgtccatgccatggctcaaggtttgaaaaaaacggggatttgatagataatcctgcgaccggaggtgttgatattgggtaactattttgacggatattattataaacaccaaaaaggagacgatgttctttctttggttgtgggcaggtcaaattcagaggagtttatacaggtaataaccagggattcttcatacaatgttccgtttataggtgagaactatttttctgataagggcgttagtttaaatataaaaactgatgaaatttccttaaacggcgatttggagtaccgggatttgtctcctataaaatatgatataatggggccctttaaatattttccaatggagtgcaggcacggaatcataagtatgcgccacacactggaaggcaggctgaaactaaacggaaaagaaatagacttcacaaacggtttgggatatatagaaaaggacagcggaaggtcgtttccgtcttcatatgtatgggttcaggctaatgattttgacgagccctgctcaattatggcttctgttgcggatataccatttttgggatttcattttaaaggctgcatttgtatcattcagtataatgggactgaatatagaatggcgacatatttgggagtaaaggttataaagtgtgccaaagacaaaataattttggagcaggggaaatataaactggagatagatatagacaaaaataacggacaagagctgagcgccccaagcaaaggtgagatgacaagaacgataatagaaacagcagcctgcgccggggagtttaggttttataaaaatgacgatatgctgttttctttaaagtcaaataatgtgagttttgaatacgaggcataatagtataatttggcgcatccatattggatgcgccaaatcaacgcaccaatgtagagtgcgacgaacacatataacgctctcatcagtctgaacaatttccaatccgcgcacccgtgtagggtgcgactcccttacggtaaaaattaatggaaaggcagcaaatatttcaatccgcgaacccgcataaggcacgacacaacttctttaattcatccgttgtaagtttaacatttcaatccacacatacgcatagtgggtgacttattttctcatgtttaggtttctctgattctattttaaaatttaaaattgctaaactggtgttaaaattttttaatttttacagcttttatctatacacatttataaactagggtctattctttttttacaatttctgcaaatttcataatgcttttgagttaaaaactcttcatcctttgttggttttactccgccatcaacaatccactgtaattcaatacaataacctagttctatttcttttttcaacattggacaatcaacatcatctactattttagtcatttattcatcaccttatatattatatttgcagtacaaacagtagtataatttcaatccacgcacccgtgtagggtgcgacagcggtgtcacaatggaaacaaggaacaactataccatttcaatacacgcacccgtgtagggtgcgaccgtctaacagaagaacacgaaataaatcaaaagttatttcaatccacgcacccgtgtagggtgcgactgcaaaaatgtataaaattggtatatttttattcttataattgttatattgcggcataatatttaaatctttaatataatatgtgtttataagaatgcctcttattatatatttttgtaaaaacgcggtgcgaacctcccggggaaatcatgtgagcttacggttcgcacctaaaatattagggggtcattaacatagtgtgatggctttatacctatgtgctcaactttgcttttgtagttgtttccgaaataataaaaacgcagactatctgtttctttgtctattattttctctaacttatgtaacagcatttttgattgtcctgcgtcaagaaaacactcaaatactgaattttgtactctttgaccatagttaacacactgttttgctacttttcttaaccttgtctttccggcgggggttacggtgtttacatcatatgtgattaaaacaagcatgaaactcacatcatttccatagtaatggaggatatgcgtccatatcgccgcggatatatcttgccagcaactgtgcttgtacaagtattgccgtgccccactgcattttttcttttgtgaaaggatgtgttattgtctcttgttttctgttctgtcattggctcagaatcgtttttcttgcttcatcacagatagtaaccgctccgctctctttttgagaaaaactatctatggtgacttcccgtctgtttattaggcttaatacaaatctgtcagcaagaacgcttctaaactcttccatcaaatcaagtccaagcgacagcctgcccggtctgtcacggtgcaggaagcctacatatgcgtctaagccggccgcctcagctgcggcagatgtttcatgtgcgagcacagtataaacataggacagcatagagtttacagggtctagaggagggcgcttgtttcttccgttaaacagaaactcgtccttttgctgaagtatcatttcatcaaatatgccaaaatatatgctcgctccgtaaatatgccgccttcaagtgtgtggagattttctttccattgctgttctatatatatgagcgcccattgtctgggacagaaagcgaaatgctggattcctcccaaagacagaaaatcatcctcattatattccattaaactcctccgcttcaaggccgcttagaggttcaactgatatagaataatccgcaagcgacttgccttcgccgctgacaactacttttaaactcctgtgtactgtggcggaggagtattgccctgctttgcagttatgtttccaccagtatacctttaaaatttccatactgccgtcaggtcttgctgatgagcaatcgttttcaaacagggtgcagagagcctttttaatctgctcggcgtcctcctcggtaaagcctgtcttttcagcaagctgaacgttaatgctgccgaaaaatttgtatactccgaaatcaaccctgtgttttgagcccattgtgtctgacgcttttgcttttccggacgcactgtttacgcttttggttatctgcatgcttgtaacgtcgataggtttaatgctcaccgcggtttggactgttacaggccctctgactccaactgatagattgtcgcctttaaacgcaaacacttgtccgaaactgcgaacgtctatccattctttgcaggcggtttctgcatatttatcaacgtctttttttattgcttttaattcttcgcacgcgtcggcgcgttcgtggaggctgtcaaagccgtcgtcttttctttcattagattgtacaaatatttattctcccaggtcttggagacggtttctgatttttcttttaaggcagacgtctgatacctcgccgtatccgtcataatttattctcggtctgttcccgtcgagcgggtctccgttagggttggctttgttaactgaaaataccacagcaaaatcaattttgttttgtaaagtgctcattagttttcctccgtttcttttgtttcgtcttttttatcatgtttttttaatagttctgctttttgacaagcatatcccaataaatactgtgggtcgagcggtttgttattcataaaatcattggcgcttatttcagcaataactttttgcatctcgtcgtacagccatgtgcttgaactataaagcttttcaacatacggaagcagtttttcatcaattaccataagcgttttggccggctgtattctgtatttgcttctaagttttatagcgttcggaggacgcttgtctcctgatttatacaaaacatagtcttcaatttgttcggcataggccaataccctgccgaaaagatagcttctgtctttgttgcttttatctaatgacatgctgtagttcatccctttcgtatcatatatgtatttatttataattgaacatgttatgctggtcgctttgctcaattcccagtcctcattaaaagattgaggatttgaaactctttgcagtgacttgttcataaaatctttgggcatgcgtttgccgtcggttatgcaggatattagtatttccatcaaatgctttttttgtttttcgtcaacatttcttccgtaggcagcatatataatatcgtttattgaaggcgcgccggtgaactcaatatgttttaattcttgttttccgtccggtaaaatcttgctgactagtttatatttgtgattccaaacgcaggtcgtatgccaggtttttattctgtcaagataatcgtttggtgaaaattcacggtagtatgtaatagacagccgccccggagttgctgattccaaaatcataataataacattgtcattatcaggtattttgtatttatatccatttactgccaactcaacaagcttggcatattgtctttcagaattataaattgctgccggcgcttcatctccaaacgggtcgccgccagccgttatgtcataggtgtcctgtaacggggtcggaatatcctcgccgccgacgcaccaaaccacaactgtttggtctccggttgaaaacccttggttactgaccagccatctgagcgcactgtgtgctttatcagagctttcaaatccaactgagaatacgttttccttatttttgaatcgtcctctatatgtgaaaccgtattcatcgtttgcagagattagtcttgcgctgtctccggttgttcgtatttttgtagggtgcttataggttacagcctgggtggttccgctgacgaaacatatagacttttgtttgcggtttttgcggtcgtattccatataggaattcatcagttcagaatttgtgttgcattcaaaagagtttccgtatttatcctcaacccgaaaacgtacaacagtctttaatatatcagcaggcttattgtctttgtcgccgttccattttaacttttcctccggaagtattaaaccggattctatcaagtcatgaaacacagtgccgcgttttatgtatttatatattgctttaacttggtttggacaattttcgtcattgcaccagtcagaaagctgggcgcagtatttttcataattttttgaattatcttgcttagctatgtatctttgcgcgtcgccggctatatattttaagttgttataaacaatatgcggcgcgttattgctgctgcgcacagcggaatcttcagtgcatggggttatcgttcttgcttctgattttgtcagcggacgtatacgcagcagctcgccggattcattcagaaatatctcggcgtgagcattttgaacggtgtgggaaggaggagcaagaggcatgctgcagcgttttaataattccgggctgtcttttaatttttcatatgtctcacagagagcgtttatccagctcatccaaatacccccccgcgttcaaattcttctgcgcctgaaaagttttttccgggtataaatggtttgattttatatttttcagtatccatcactattgaacattcttcaggacgtataaactctataattccgtttttcatctgagcattccaaagccgtgtctgcattttttcaagcccggattcatcgggataagtgataccatgaaccattatgccaaatgacatgctttcattatcataataaccgtttccttccccaaatgtgcagggttcgacatatccctgacattccctggcgcctagaaaaatatcgcgtcttccgccccggtccagcatacgtttggtgatgaaaaagtgtttattctcatttctgtcatccgacagctcttctcgctgcatgttccattcaaaatgggcttctacctggtactcggcgtctattaaatatgtatatattgacaggtcattagaattgttttgatattttggaacgcgtatgcctcttgattcggtgcgtatgggattgattattctcaccctatctatgtaccatataaacgtcggtttccagtatatactttcacatatgccttttaaggcctgatatgtgggaactgaatagctgaacttttcgccccccgctttggttatagggtcgctgaacagtgcggtgcgtccggtaaggcgaaagcttattttgttttctctgttcaaaaaaatcacctctttaatattttaaaattctaaatccggattcatgtatactccgtaattttcatcataaaaccttctgttgagcacaaatgttcctgtgtcttctataataaatattcctccgctgtctttcagctgccgtatttcattttcatacagcgatacgctgtacgcataactctttcgtaataatttggtcttttggctgatttctgagtgtccgtttaagctgttaattatttcagctccgtcttcatatggaacaagcacagaatatgtttcgctgccgataactgaaaaattatccccggctgccgcaaaggcttgttttaaaaaaggcagaggtctagcagtgtgagattcgattgaaaattcgttttttgaaagcagacagacaagcgaatcttctttaggcagtttcaccacatagtcaaactcgcttaaattgcttgttgggacttttagatattcgttgtaatacgcttctattgcttcacgtgagagcaaatcaatattttttttgtgggacatcacggcttcagtgcattcttttgcttttgctatctcagggagacttgagagattttcaccctcggcccgtataagatatacttcacgcagtccgttgaactctccttctctgttgcaccgtcctgccgtctgaatcaaactgtcaataccggctaaagctcttacagcgcacgaaaatgataaatcaacgccggcctctatcagctgggtgcttattaccacaagtttttcagctgaatcaatattggccttattattcagcttttgcgtccgttctttaatttctttgattagtttatctctatgtgcacggcagagtttggcggttagcaaaattttccggcagtcagaatttatggaatcatatacggcacgggcggtcttggtagtgttaaaaaccagcaggacagacgggtttgttattaaacgttcattgacgaattctgctatttcttcatagttcatacttttatcgcttagatttatagctttaacccttttgagagctccgtcagtttctgaactgtaaggaacaatatcaggaggaacactgagttttattggatgttcgctttcgtttgactgcggcatggtggctgtgcataaaattatggtggagccgcatactttgtgcagaaagtttattgcttcgttaaataggcttaaagttttaatgggtaccgcctgaacctcgtctataatgataacagagttgcaaagggcattcatacggcgctggcagcctggttttcgtttatatatggagttaagaaactgaaccactgttgtaagtattaccggcgcgttccacctctgtgtatataatgaatatttttcgtcatcatcgttgatgaaacctgaatggtgttccaaaaccatatcatcaccgcaaatctctttgactgcgtcggcggtttggtcaagaattgtggtgtatggtataacataataaatatggccgcaattatgcttttgggcatgatgaagtgcaaatctcagtgatgacagtgtttttccgccgccggtcggaacattgagcctgtatattcctttgttatcggaaaaatcacagcatttttgagacacttcgcatctaattttgtttagtgttgtgtttggggaaaatgacgcggctttggcttccattttatttacggcttctgaccaatcaatcggctcagctataagagggtcaatatcagcctcaaagcagtatgcgtcatagcggtcgctgtctaccaaagcagaaaataaaagcttttgcagcattccgcaggaaaaagcgttgaacggtttcatctttgctataaaatctcttacttctgcaacagcctttttataaagttctttaattttattttcgctgattacagtttcaaaaaatatttcggctgccttttgataaaaattgtcagttgtattcattttgtttaagaagccgttttccgcatctacagtaatgcagtcaaaaagcccggtatggtgtgaataaaccgcgtctataataagctgagctgtatactgctcgataacgtctgccgccgacgtataaaagtttcggtaaatatatagagctccggtttgtgcgtgatgaacagttccgcgcgccgaactgtcgtttttgcgtatgtattcctgaaactcgggagacgcctttcccatatcatgaatcaatcctgtcaagtatcccaaaatcccaagacctgcttttttcattgtttttgaacaaagaaccgcagcattttcagaatgatttaaaattgtttgtgttttgtctttatcgctaatatatcgggctataatatccacttttatctccgtatgttaaaacattaaaaaatttattgtaatttgttatattataaaataaaaagaaaaaattttgcaagacatttgtgatatttgttaaaaataattatttgtagacttaaaaacgtatacgccatagggcgcaagacagcgctttatggcgtattgttgtatgtttgaaaatttataaaatacgtttatttaaaaggcaaagttatatcgatttcaagaccgtctttattttttgcattaaatgttccgctgtgagcggttatgattttataggccataggcagcccaagtccgtgggcagtctttggaattttatttaaattggttaagattttttcatcagcaccggcgccgttgtcttttatattaatacatatgtcagtatcattttgcgaagccgatataaaaattttgcatccgtctttgttgtgaactatactgttgtttatgagattgaacaaggcgcgttcaagaagcggctcatcccccataattactgcattctcacagtttaaatttaattctattgaatatttatcggataacccgctgtttaatatatccgtaactatgtttcttattaaagtgcatatctttatctctttttttcggttaggctgcatgtcatactctaaagaagaaactaagtttaaatcttcaataagtttttttatttttaaggtttgttctgttattattttggctttttctttattttcgccgtctgtttccgaaaacagttcttcggaatatccgagtattatcgaaagaggcgtccgtatatcgtgtgagacgcctgagatccaattagaacgggcggtatcacgctgtttgattatttgattttttcgttctattgaatcagatgtagtattgatgttcttagcgacttctttaaaaataccgttttcagacatgtgtacaggtttttcttgttttaagttttgtataccttgtatcagcatttttatttttttatataggccgttgccaaaaacgcaggctaataatatagcaaggcaaagattaaatatcagcacagccagtattctttgcggcagggtatcaaaccaatgcatcgaaaactcaatattatattttccaacgctgtttttgggatatcccaatataaggagaccatagtcacagactttctcatacaccggatagtcgtttaagaaccagcgtgatataacggcaatatcatttatattataactcgccggaatatcgtccggcacgttttgaccccatactacgtttccgctttcatctataagtatacaccatgacccttggggaacggcagtttcataggcaagaatgtatccgtcttcggtgtaggtcaatgcttctgaaatgcggctgagagtttttgtctgagattcgggatatatttttgctgtgtcagccgccgtcatagagaagctgaaaaagtttatcagcagcaataaaattgatatgccggaagcaagcaggataaaaaacataaatatttttatggcggttttattcattgtctgaaacctccagtttgtatccaagcccttttacggtaataatatgtttgggctttgagggggctgtctcaatcttttctctaagacgtcttatatgcaccattaatgtgttttcgtatccgtagtaaccgtctccccatgcggcaaggcataaagcgtcataagtcacgatgcggtttttgttttcataaagtttttttaagattataaattcttttgcggttagcggaattacttcttccctaaatttaactgaagcggtttcaagatttataactctgtccgagagtttaatgtctgtattcttaataaccggtttataagttcgttttaaaacggcagtaactcttagaacaaattcacttgtaaggaatggttttactatatagtcatcggctcccagcccgagaccggtgagcctgtcgtccgcttcgccgcgcgctgttaaaaaaataacgggtgactgggaaaacttccgtatatcctcatatagagcaaaaccattgccgtccggaaggtttacatcaagcacgaaaagggatatgttttgttctttggcaatttgcaaagcattgctgcagttttcggatttaaagatgtgataaaagccgctttcaaatagtttgttttcaagaagctttaacaattctttttcatcgtcaacaataagtatttttttattttttatttcatccatttttatcacctgactgtattataccataatcggctgatagataaagcgaatatttttaattttttctgatttaaggtcagcgtaaggttaagttaagtctgatgaaagaatgaggtgttaaaatcgttataaattaaatgagaaaggaagttttatcatgtcaaatcaattagtaagaacgttcggattatctaaaagatatggtgattcactgtctgtcagtaatttggatatgacggtaagcgaagggaaaatatatggttttttgggaccaaacggagcgggaaaaagcaccacgcttaagatgctgctgggtcttgtccgcccttccggcggagaaattgatgtattcggcaaacggtttaactcaaaaaatagaatgaaaattcttaaaaatattggctcgctgatagaaacgccctcgtattacggacatttaaccggaaaagaaaatttggaaataattcagactatactcaaagttccaaaatctaatattgacaaggtgcttaaaatagtgcgccttgaatcccaggctgagaaaaaggtcagggcgtattcgctgggaatgaagcagagacttgggattgcttcggcgatgctggcgtttcctaaattactgatactggacgagccgacaaatgggcttgacccgtcgggaatacaggaaatcagggatttgatacggtcattgccgaaaaagtatggaatgactgtgatagtttcaagccacttgctttcggagatagaccaaatggcggacgatattggaataatagctaaagggcgtatgatgtttcaaggcagtcttgaagcgcttcatactatgggagaaggaaaaagccttgaggaaattttcttagagttaacaaaaggggaggagagcctgtgaagagatatttattttgtgagtataagaaaacaagaagaaaatatatttttgttatggcagttgccataaccgctgtggcgttatgctggggattatatggaaagtataatgagagcgcattaaaaagcggctggatgatgatgctctatcagcttccgcttttgaatacaatttttatgccgttgctggcaattgtagtggcctcaagatttgccggtatagaaacctcaatgatgaaacaattatgttcggttatgccgaagcaaaggctgtacgacgctaaactaatatatagcttatctattataattgtttcattgcttatacagtttgccgcagtctatatagcaggcagatgttttggattcagcggcaggtttcctatagaattgtatgccttatattttatgtttacaatagttccggccgtggaaatatatgtttttcaattcagtgtttctatgctttttaaaaatcaggcagttccgttttttattggagcgattggagaatttattggattatttgcactgtttcttcctcaatacccatggataaggaactcggttatttgggggcattacggagctcttcagtttgtgggaggggattgggacaaagtgacaaggataagcacgttttacttaatggatataaattgggttatgtttgcagtatcgatattattatgcgtagccttttattttataggacggactttatttgtccgcaaggaggtataaaaatgattttaagtattataaacgctgacagaaaaaaattaaaaagagcgccgctgtggcttgcttttatatttatgccgataatcccggccttgctgggcactttgaattattcagccaatttggaaatattggaaaacggctggtatagtctatggacgcagaacactctgtttacatgttatttttttctgccgataatgctgggtatttactgctcatatttaatcagtattgaaagagcgaatcataactggaataaggtgctttcaatgcccgtcccggtttggcaggtgtttttgtcaaagctgataatttcttcgtttatgttgattatcagcgagatctggataggtgttttattcattgtttcaggaaatttggcgggtattgactctgctcttccttcggaattgcttgtttggctggggtgcggaactttgggcggaatagttttggtgtctgctcagcttttggtttctttaataattaagaattttgcagctcctgtcggtatagctttaataggcggactttcgggtttagccgcgctggcaaaagatttcggccatatatacccatattcgcttatggcgtttggaatgaattccaatgcgcctcagcgtctaatggaagggggatatttaaattttactttgacatgtattatctatattgttattttcacaacaatcggaagcgtctatctttcagtaaaggaacaaaaataaataacatagttaataagactgtggctgcaaatcatcagccacagtctttattaattgaaagcaagcttcagcttacatacgtttatatgggtgaagatttaaagtgttttgcgcatatgtcagtgcttgtttatgccatatcgcctgtaagctgcaggatttcacatgttaaacgacactttcaatatatcagcacagattttattatattctaaaagtttcttgtttttaacctttctgtatatttactgtttttgggttacaattatattttattaaataaaattatattgccgattaaaataatttatagaagtatttatataaattgtttgttagattttgttcacacattagggtattaaagcataaatacattgatttatattttcacctattttgtcggtttatttgctgtttaaaaaactttctatatcctccggtgttatcttgccgtgttctttttcaaaatcgtcaataagcgagcgcattaaatacaatatttgaccgctgccgcttctgccgttatacctggcgacataataaaacttgttaagaaaatctgaatctactctaatgctaatatgttttttcttattcataagtattccctcctataattaatactgcactaagttttagtgatttatgaattgattttacactacaaatgtgatataatttcacaaatgcactaagtattagtgcacaatatttaaaggagaaatttacgtgaaaaatataaaatataaaattcatagaatttatcgtcttgcttctaaagtaaacttatatttaaacttatctgtaaaacctgacgataaacgtataaaagcaggacttaatgagattaaaacagttatagaaaaaatattatcagagagctaagaagaaatataaaagtgtctttttaggtatatttttaatatttaataaatagaaaaaagtttatttttaagtataaacgcgatagaggaagtattattaataatatatgaaaataaaaatatatttaattgaattttttgtgataaaattagatataactttatataacatatattaaaaagtttaaacatttttatataaatattttattatatttctgcattattaaatcaggttttatccgctgtaaaagcagaggagtcccggtaaaattttaaattttattttatgataatgttatgctgtctgattatatgaacgctgtgattcaatagcagttttagtaaaagatacttaattattgaaagctaatgtaagttaatttaattataacacgcgcactttaaaaaagttaagtcacagttataaattaggaaaacgaattttttgtattcaaattaatttttctgtccgccatattaacgtctttaagctgctaacattttaataagcagcgatgtattttaaccatcccaaaaacacaatatatagtaataaacaaattggagcaaattttttttgaactctacctacaatgtggagaggttataataaaattaacagaaatataaaaattatatataaaaaatatgtgtttgcaagcatcggagggctgtgaccacacttttcttaaaaagtgtgtgttatacatatgattttattttgccataatctacaatgtctgtgaccccaccattctggtgggtgtgatacaaaataacttgttttgattaaccttcaatgtcaataatatgaatacgcaaatattattatgaatactcaatgaagatgaaatctgccgcgtaaggcgcgcagtcacggtaaagtttattattaaataggatataaaaaactgttttaaatacgttcacgctccgcgtgagatgactgctcacctaacgaggaggacgtgtacgcaatatatcacaattaataacgtatataaattatatagaaataccatctgcttatatgctatataaataaaattattttataatggataaaatttataaaaagttcttgacattagaattttatgtgctataatctatatcatacttatttggtatgaaaactaggaatggaggaaaagtgcagatggatagaagaaaagaatggaagtttgaaacgaaacagcttcacgtcggacaggaggaagcggatttggctacaggtgcccgcgctgttcctatatatatgagctcgtcttatgtgtttaaggattctcagcaggcagctgacaggtttgctctgcgtgagggcggaaatatatatggaagactgacaaatcccacacagagcgcttttgaagagcgtatagcggctcttgaggggggcgttgccgctttggcggttgccagcggagcagctgccataacgtatactttccaaaatttagccaaaagcggagaacatattgtgtcctccaaaaccatatacggcggaacttacaatcttcttgccagcactcttccggattatggtattacggcaacatttgttgacccgtcagatacgcagaattttgaagacgcggttcaggaaaacaccaaagctatatttattgaaactttaggaaacccaaattcaaatgtttcggatatagaggaaattgcaaaaatagctcataaccataatattcctttagttgttgactcaacgttcacctcgcctaatttgataaggccgattgagtacggcgcggatatagttgttcacagcgctacaaagtttatcggagggcatggcacagctctgggcggagtaataatcgacggcggaaattttgattgggaaggctcaggaaagttccctgatttggtaaatcccaatccgagctatcacggtgtcagctttactaaagacgtgggagcggctgcttttgttacaaaaatcagggcggttctgcttagggatacaggagccactctgtcaccgttccatgcgtttttgtttttgcaggggcttgagactctttcgttaagggttgaaaggcatgttgaaaacacgcttaaaatagttgaatttttaaataatcatgaaaaagttgaggctgttcaccatccgtccttgccgggagaaccaacgcatgagctttatgaaaagtattataagaacggtgcgggttctatatttacctttgagattaaaggcggtacggaagaggcacagcggtttatagacaatcttgaaattttttctctgctggcaaatgtggcggacgcaaaaagtctggtaattcatccggcaaccaccacgcattcacagctgagcgccgaagagctggaggaacaagggataaaaccaaatacaattaggctctctatcggacttgaaaatgcagatgacttgattgcggcgctgggagacgcttttgaaacaatataacaaatacctccgttttgcaggagtattaattaagttttgaggcacctattacgttatagcattaaagcatgattgagctgctttgtgaaaaaaactttgaatggtatggtattattttcatatttttgatataatagttacaatataaattgtctgaaagagggaaaaacaatgagtaaagttgtaaagagtattactgaacttataggaaacacgccgatgctggaactgacaggtattgaagaaagtcatagtctggaagcgtctgttatcgctaagcttgaatattttaatccttgcggaagcgtaaaggacagagttgctaaaaatatgattgagaatgcggaaaaaaatggtgacttaaagcccgggtcggttattattgagccgaccagcggaaataccggaatcggtttggcttctgttggagtttcaaaaggatacagagttattataacaatgcccgagaccatgagcgctgaaagaagaaacttgatgaaagcatacggcgcagagctcgtgttaactgagggctcaaaggggatgaacggagctattgcaaaggctgaggaattggcaaaagaaatacccggagcgtttataccggggcagttttcaaatccgtcaaatccacaggcgcactttgaaacaacaggaccggaaatatgggagcaaaccggcggcaatgttgatattttagtttcaggtgttggaaccggcggaactataagcggagtgggaaagtttttaaaatctaagaatccgaatataaaaattattgcggtggagcctgaatcatctccggttttgtcaggcggaaagccgggtcctcatggaatccagggcataggagcaggatttattcccgaaactttgaatacagagatttatgatgagatagtcaccgtcgctgacagtgacgcctatcagaccgggaggaaactggcaaagacagaagggctacttgtgggaatctcgtcaggcgcggctgtttgggcggctgttcaggctgcaaaacgtgcggaaaacaagggcaagactattgttgccgtacttcctgacacaggcgagaggtatttatcgactcctatgttcacacaggcatagaaattattgagacttcagaaacgctaaaaaacacgtgatgttctaatgacctaagttttggtttgtttagaacattgcgtgtttttattataaaacgatttttttattaacttttatttattctgttcgaacattgggtatcatggaaaggacataataaagtggacagaaacttttaaggtcattaataataaaaagaagtataaaacacattcgattttttgttttgttttctgttgactttccgcctacaatgtaatgattagaataaagaggacgtaaatgtaagagtgaatttttataacacaaacccggacgatggggtcacagttacaccttccaatgcttgcaaaatcatatttattataaaatttatttagaatggatagttaacattttaaaagtatggtaacagccataccgttgtttgctatactacattctttatataatttttattatataaccttaacatttttgtgcaatatatagcagcatttccagtttattgatataagccgctttgtatcatacacactttttaagccgtcggcagttttaatttcataggtgtgtatcttacaccgtttgttatttgttctgagtcggtgttctcgaatccgaggcggtgatatattggaactgcaaacggcgaagagtttacggaaatattaccggttaagctgtctttttttatgaactctaaaagagattttcctatccctttattatggtatctgccgtcgacaaaaaataacgcaatatgacatcctttattgcgcgttgcgataataccaaccaactcagcatttagaaatgctccataccaatgcagtctgtttaaataatttgggtcatgaatgctattgtaaaattcgtcaactccgtgtttactgtattcaggcgcttcgtattctaaaaatactttccagaccaattttagggcttgttctatttcgtttttataaagttctcgtaaatgcaaataaccactccttaatggatgtacagctaatatttatttgcttgtattggtaagtaatttttaaaacggcttaaaccggttttatagttttcggctgtaaacctctaatatataaggttcttttgtttttaaatctattttttcttcagaatattgataagaaaaaccgcaggataatgccaaagctttggatatcttgttattagcccgtgttgaataaaaaaactcttttcctctcaaagtgttggcacagtattcaagcaataactgtaaggtttgtttgcccaagcctttgccggtatattcgggtcccagcgcaatgccggcgtcctgaaaaatatgtggggatatttcctcaaccccggcaaagccaatagcctgaccatgttctttttcgtatatgaagtatgtatcatgcgtcttttgataagtgatggttttctttattctctcttttgctgattcttctgttttggttatttgccattgcatatatttggctgtttccggtcttgaccaaacatttttgtgcattgattcccaatcctcaaattttgcttttcttaatacaatatcatctgtttccattggattcatatagattcctctcattttttattcaataataattcatctgaagtatagattcatataatagatatgtttgtaagctgcagagaaccgcaggttatatctttaggagttataaaattaaatatttatatatcagccgtcaactgattttagggcgttcatctgataatatctgccttttttagccattagctcgctgtggtttccgctctcaattatctgacctttgtctattactataatattgtcggcgtctcttattgttgaaagcctgtgggcaattattatgctggtgcggtttttcatcagacgaatcagcgccctctgaatgtctttttcagtctttgtgtctaccgagcttgtcgcctcgtccagtatcagtatcgggctgtcgcacagcaatgctctagatattgcaatcagctgtcgctgtccctcgcttaacgtgtcctggcttccggataccaaagtcagatagccgtggggaagccgtctgataaatccgtcggcgtgcgaaagtttggcggcttttataacttcgctttcagtggcttcgggtttggaatatcttatattgtctaatatcgttccggtaaacaggctggtatcctgcagaactacagaaaaacagttttcaagactttttcgttttatgtctttaacgtccactccatcaattaatattttgcctgaatccacatcgtaaaacctggttatcagattaacgattgttgtctttcctgaaccggtttcacctaccaaggcaacattctgtccggggtttaccttgaaagaaatattttttagtatttgtttttcatcgctgtatgaaaagctgacgtcttcaaattccaccctgcctttcacattatctaagtctaaagcatcttccgaatccgctgcttcctcgttttcatccagtatctcaaagacgcgctccgcaccggcaagcgcagactgaatattgttgaacagcccggcaacagaattgagagggttggcgaattgttttgaatacgtcataaagctgactgcagttcctatcagcagaccgtattttgtgcagagtattcctccgactatagcggttattgaaaaagtaaggttgtttattatgttcatcagcggcatcatatatcccgcccatatttgagcgctggttccgcttttctttaactcttggttgacttttgaaaaatcggtttgtgtgctttcctctttggaaaaggcttttatcattttaagtccgtatatgctttcctcaataataccgtttatctcgcctaaacttcgctgttggtcataaaaatgttttctgcttcttttagcgattactcttgtgagtatgtataccaaaggcacgcaggtcaaaacagccagggtcagcggtatgctcagagaaagcattatgataagcgagcctgagattgtgagtattgcagaagcaagctgagttgccgactgtgcgattgttgtgcttatggtgtcggcgtcattggtgatgcggctcatggtgtcgccgcgcggcgttgtgtcaaaaaaagacagcggaagtttttgcagtttagaaaatatttcgcttcttaaagtcctgaccaatttttgagacacacttaaaattgccgtatcactaattgttgttatcagccagtttgacagatagagagcggctataaccgaaactaaaattataagggaatgattattaaccgttctgagctcggtgttaaatgtgttgaaagtcttacccacaaagtagggaatcaatactgatattccggaagccagcaatgtaagaaatacagcggagataactatgcctttaaagcgcatatacacttttataaggcgcatcagagtgcctttttggtcttttgctctctcggtgttgctgaacctggcggctccgcctacttttggtcctcccattctgggcagctcaatattttttgccatattatcacatcccttccgtgatactgccaatctgagaatcaaatatttctctgtaaatgctgcattcctcaagcagttcgtcatgagttccgaatccaacgcgttctccgtccgataataccaaaatattatcagcaaacatggctgtcgaacaccgctgggttatcaggataacggtggatttattatcttctgacaggaggttgtctctaacctttgtttcggtgagtgtatcaagggcgctggtagcgtcgtcaagaaccaaaatcggtgagtttttgataagtcctcgggctatggatattctctgcttttggccgcctgaaatattaacgccgccgcttcctaagtatgtgtcgataccgttttccatttcatatatgaaatcggcgcctgatgcttttattgcagcttcaacttgagctttttcggcttttgggttgccccatgttatattgtccagaaccgtgccggaaaacagcatagctttttgaggcacaagggcgacgctttttctcacagtttcaatattaagtttttttatatctttgccgtcaaacatgatactgctgttcttgtcagggtcatataatctgagcaggagccaggcgagcgttgattttcctgagccggtcgggcctataacagccaggcttttcccggcaggaacataaaaggataaattttttatagccggaaccccgctgcctcccggatatgaaaaagtcacattgttaaactcaaccgtacctgaaataacggcgtctgagttattctctgagttcttgaaatcatcctcacagtttagtatctcggttattcttgaaactgaagctttggtttttacaaaagtattaaatatatttgttatcatcagcagagaacttaaaatctgcgccatatacactataaaggctgaaatctgaccgggctgggtcagaccgagagtgaaaagcctgcttccggcaagcagtgcggccgcggagcctaaaccaacaacaagggtcagtataggtgaaataaatgttattactatttgagcgtgcacgccttttttcataaggttcgcattatcgtcttcaaaccttgaggcttcgtcggaatatgttccaaacgcttttataagcctaactcccattaagtattcttcaactaccgtattaagtctgtccattgccgcctggagttttccgaaccggggatatgacagcctcatccctaagtataacagcagaccgactattataacaaccaaatagattattatgcttagctgcaggttgagtattgaagcgaggattatactgccgatacaggttagaggagccttaaaaaatattctcatagtgccgtttacgaattgtgtaagctgagtaacgtcgtttgtcattctgatgattagagagccgctttcgattttatcggcgcttccctgcctgaaattaagaatttttgaaaataaatcgtatcttaaatcggctccgaagctctgagaaactttgctggctattatatttcttgagacggcgaacactgcacccagagcagcagcaaaaatcatgcgtccgccccataggtatacgttctgtatcataccaagctctatgccgtcgtttattatatgagacatgagcgtcggtcccaaaaggtcgcagagagcttctagagctacgcatgatacagcaataaaaaaccagtatttatatttggtaaaatagcgcatgtatattttcaagtgctgtcgacctccattgattttattggtgtagatataatattaaaagcagaaaaaatttattagccaaaagggttaatgataaatttttctaagtatgttcacgctgcatgttagatagcagctcacctaacaaggcgcacatgcacgccctgctgtactaaaaacactccttatttttatgcctttaaaaagttttagatattatcttttgggtattgcggataacgttttttatcttcctcggttatttgacgtattggtctgcagggaacaccaactgctataacattgggcggaatgtctttttttacaacacttccggcacctattacagaattatctcctatttctgcaccgcccaaaatgacagtgccggccccaatccaaacattgtttcctatctttatcggttttgccacttctaaacctgcgtttctttgttcagcgtcaatcgcatgttcggcggttgtgatgcacacgtttggagcaataaatacatggtcgcctatttcaaccttggcgccgtctgtgattacaagattatgatttgagtagaaaaaatctccaatatataggttatatccaaaatcgcaccagaacggagcggtaacttttgcgttttcgcccaggtttccaataatttgttttagcagacgatttttgttttcctcatctgaaggtttaatctgattatattcataacataaatcagtgcacttttcgatttcatttacgatttcagaatcataatttgcgttgtataagtatcctgcttttgctttttctttctcagtcatttttatctctcctaaaaatatatttttataataatctatattttataaaatatatcataaaatttaaaagttatattttgatttagcgcctaatgagatgtgtaaacgtataatattacaaccaagtttgattactctgcaatgtctgtgaccccaccagtatggtgggtgtaatacaaagtaacttgttttattatagccttcaatgtcaataaattacttagttgtgatgtattgtgaccccaccagtatggtgggtgtaatacaaagtgcttagttgtgatgtattgtggttgtacatcccgttaggtaactgtcatatcacgcgaagcgtagaggtgcttagaatagtttgttatgaatcttattataatgaacttttccgtgactgcgcgccttacgcggcgtacttcgtacgccctccgaagcttgctataccacatttttatatgatttatttttaatatatttgattttacaatatatctccacttaatttggtctttctattcgagtattcatattattatttgcgtattcaaattattgacaatgaaggtttatcaaaacaagtcattttgtatcacacccaccataacggtggggtcacagacaatgaaggtttatcaaaacaagtcattttgtatcacacccaccataacggtggggtcacagacatcgtaggtttattaaaataagtccctgtggctcacacgtggtcacagttacactcttccgaagcttgctgtaccacattttttataaatatttgttatataaacttgatttgtttgtctgtttttttggagactttccggtaattataaaactcaaaatatatttataacaaaatattgaacatttcacagctcttaaaaacttttaattttattctgcatttaagagtatatcataaccggttgagtaaatctattgtatattttatatgaaagaaatgtaatattttaatcagccggttaataaattaatcaagctgtgggtaaataacaatatagttatggaaatatgaagaaacattattaatgaaataaattatacctgtatccgcaatttgcacaagtaatttactctcaatgttaaaaatttatttacaaattttttgtgaaaagctattgacaaagattgggtgtggtgctattattataccaggttagcactcgacttgtgtgagtgctaacaagtaaattgttttatacaaaggagggcaggcttatggcatcgctggatgacagaaaaaagctaattcttcaggctattgttgaagactatatcaaaaacgctgagcctgttggttccagaagcattgctaaaaagaccagtcttaacctcagcgcggcgacaatccgtaacgagatgtgtgatttggaggatatgggaatgctgattcagccgcatacctccgccggacgtataccatcaaatgccggatttaggttttatgttgacaacttaatgcatagatatcaaatgacggctttggagataaaaaggcttagagccgctatgatgaataactttagggagcttgacaatattattaagggcgtgtcgtcagcattttcttccattacgagtttgccgacgtttgctatgcttcctatgaataaatacggcaatatcaaaaatgttaagctggccgacgttgacggcagaacgataatggttattgtttcagactcttcaggtcttattaaaaataagctgctgagactgaggaatactgttacgcctgaggaagttgcaaagctgaacagagttataaatgaaaatatatcaggtcttgatttagacggctttataagtcttgacaatgttatgggtataaaggacgctgttggagaaaacgttgaaatcctttcatctgtgctggagcttatatatgaggctcagagagaaattgagagcaaacaggtggttgttgaggggacgtctaatatcctgcggtatcctgaatataatgatgtggaaaaaattaaaaatatattggaattttttgatgacgaaaacgtgcttggcgaaattgtggacgcggttcagtttgaaggagacggcggcgtggatatatttatcggcgacgaacttccgcttccccagctgaaagagaacagcgttgttgtttcccagtaccaggtcggagaagatttggtaggcatagttggagttatcggtcctcagagaatggattatgctaaagttgtttcaggcataaagttcttctctgaaaatttaggtcagatgcttagcagcagattcagaccggacgatgatgaaaatttcgattataacggcggaaaagaggatggttaaaagtgaaatctaaagaagaaaatcagcaggaaactatggataataaagaaagcaaaatagagaaatgcatggaagaccaaaaacagcaggacgaatcggctgaagctccggttcaggagacagagaatcctgaaattaatgaagaagagactttggctcaaaagctggaagaagcaaaagacagatttttaagaaaagttgctgagtttgataatttcaagaagcgcaccgctaaagagaaaacagagaatttctctttaggaatctgtgaagctgttgaaaagcttctccccgtgctggataaccttgacagagcgattgcggctgccgagagcaatgatgacaaagaagctctgcttgagggaataaaaatggttagaaaacagttctgtgaagcgctctcaggtattggagtgagtgaaattgaggctgttgggaaagagtttgacccggataagcataacgcggttatgatggaggacagcgacttgccttccaacactgttattgaggaatttgctaagggttacgcttataacagggatgacaatgttaaagtgatacgtcattctatggttaaggtttcaaattagttattaatctagttaacaattttactaatcatataaaataaatttattggaggtaattataatgagcaagataataggtatagacttaggtacaacaaactcgtgtgttgcggttatggaaggcggagagccaacggttattccaaaccctgaaggagccagaacaacaccgtcagtcgttgcgttcacaaaggacggcgagcgtttggtaggtcaggttgctaaaagacaggcaatcacaaacccggataagacaatcagctcaatcaagcgtgatatgggtactgacagaaaagttgatatagacggaaagaaatatacacctcaggaaatttcggctatgattcttcaaaagttaaagagtgacgctgaggcatatttgggcgaaactgtaactcaggctgtaatcactgttccggcttacttcagcgattctcagagacaggcaacaaaagacgccggcaaaatcgcaggtctcgaagtaaaaagaattataaacgagcctactgccgcttcacttgcatacggtctagctaaagatgttgaccaaaaagttatggtatatgacttgggcggaggtactttcgatgtatctatacttgaaatcggcgacggcgtatttgaagttttggcaacaagcggaaacaaccgtttgggcggcgacgactttgacgataaagttatgaattatctcgctgatgagtttaaaaaggataacggtattgatttaagacaggataagatggcgcttcaaagacttaaagaagcggcagaaaaagcaaaaattgaactgtcaggcgttacatcaacaaatatcaatcttccgtttatcactgctgacgccagcggtcctaagcatcttgatatgacccttacaagagctaagtttgatgagcttacagctgaccttgttgagaagacaatgggtccggcaagagacgctatgaaagaagctgggttatcggctgaccaaatcgataaagtattgctggtaggcggttcttcaagaatcccggccgttcaggacgctgttaagaagctgacaaatcaggatcctcataagggtatcaaccctgacgagtgtgttgctataggcgctgctgttcaggccggagttttgacaggcgacgttgaagatttggtgcttttggacgtaacaccgctgtctttaggtattgagacaatgggcggcgtgttcacaaagctgatagatagaaacaccacaattcctacaaacaagagccaggtgttcagcacggctgctgacggacagaccagcgttgaggttcatgttctgcagggcgagcgtgagatggcggcttataataagactttgggaagattcagtctcacagatattccgccggcaccgcgcggagttcctcagatagaggtaagctttgatatagacgccaatggtattgttaacgttaaagctaaagatttgggcacaggtaaggagcaggcaataacaatcactgcaagcaccaacctttcggacgaggatattgacaaggctgttaaggaagcagagcagtatgcagagcaggataagaaagcaaaagaggaagttgacgttcgcaaccaggcagacagcatggtttatcagaccgaaaaaactttgggcgagcttggggataaagtgacagaggaagaaaagagcggtattcaggctgaagttgataagctgaaagaactgctcaaggctacgccgatggatgttgaagcagtaaagactcagacagaagaagtgtcaaagaagttctatgctgtaagcgagaagctttataaggctgctgcagagcaggcgcaggcagaacaggcagctgcgggtgcacaggacgcaggagctcagaacaatggcggagatgacaacgttgtagacgctgattatacagaatccgagtaatataaacaattgtgtcaggaaggaataaaagtatggcagataagagagattattatgaagtccttggcgtaaataaaggcgcatcggctgacgagataaaaaaggcatatagaaaattggcgaaaaagtatcatccggaccttaatccggatgataaggccggagccgaagctaaatttaaagaggccagcgaggcatatgaagttttgagcgaccctgataagaaatcgagatacgaccagttcggccatgcaggcgttgaccctaatgccgctgcaggatacggcggaggcggctttggaggattcggaggctttgaggattttgacctgggtgatattttcggaagcttcttcggcggaggggcgtctcgccgtaaccctaacgctccgcaaagaggcggagatatccatatgcacattgatttgacttttgaagaggcttgctttggaactaaaaaggaaataactatcagccatatggaacaatgtacatcctgtcacggaagcggagccgctgagggcagtcatcctgagagatgttctgcctgcggaggaacaggtcaggttaagtcagttcagagaacaccgtttggaagtatgcagacggttagaacttgtgaggcctgcggcggaaaaggaactataatcaccgacccgtgcagaacatgccgaggcgagggaatagtcagaagaagcaagaagataaacgttaatattccgggcggaattgataacgggcagagcctgagtgttcgcggcgagggcgacgcaggcaaaaacggcggaccgcccggagatgtgcttttgacagtcagggttaagccgcataagatttttgtccgccaaggcagtgacataatgtgcgattatccgatttcatttgtacaggcaacgctgggcggagaggtgaaagtgcctaccgttgacggaagcgttgtatacaatatccctgagggaactcagcccggaactgtgttcagactaaagggaaaaggcgctgttaagctgaactcaaataaccgtggcgaccagtatgttaaggtacaggttgagataccgaaaggaataaacgaaaagcaaaaggaaatattaagacagtttgacgacagcgttgacccgtccaaatataagaagcgaaaatcctttatggataagttaaaagatttgtttgaataaaatatcacagactgcaccgtatatagtgcagtctgttttcatacaaaataaaaaagatttaaaggtttctagtgaacgtcggcagggcagacaaagtctgccgcgttaggtgaactgccatctcacgcgaagcgtgaatatatttagaacagtttgtagtaaactttaccgcggctgcgcgcctaacgaggcaaactccgtttgtacatcacaactaagtttgattattgacactgtaggtttatcaatacaaatcactttgtattacacacacttttttaaagtgtggtcacagcccttcgatgcttgcaaaccacatttttatacaatcatattataaattgtcttaacatctggactttttaggtatttttggtgaacatcggcagggtgtgcttacgcacacctcgttaggtgaactgccatctcacgcgaagcgtgaacatacttaaaatggtatgtcataaatattttataatagtagactttaccgcggctgcgcgccttacgaggcaaatttcatttgccctgccgacgcttgccatacacatttttattatatatgaccttaacatctgttaaatctattgagacttttcaggtgttttggtgaacatcggcagggtgtgcctatgcacacctcgttaggtgagcacccatctcacgcgaagcgtgaatatgcttagaacagtataatctaaaaattaatatattaaaataataatttttataaaagataagtgacgcggttatttaaaatattaaagctatacaaatagtaaatgtattattttttgaggtcaatattgtaataaatgaattattgtagtataatgtaaaaaaagttttgaggagaaatttatggattggataaaagtcagcattattacaacaaataaaggaatagacccggttagctcagttttaaatgatttgggatatgacgggctggaaattgcggataaagacgatttcaaagaatttttggagaataaccgcaaatattgggattatgtggatgaggaactggagagacttaaagaagcggatacaaagataactgtatatctggacggcggcaatgatggtttgtcagagctggagaaaatagaaaaatctattaagttattaaaggaagccgatacaaataatagcttcggttctttaaaaattattactgaaaatgtaagagatgaggattggtctgaaaattggaagcaatattttaaacctctcgaaattggtgataaaatattgatacagccggagtggcagcctttggagtctgagacggacaggattgtttttaaggttaatccgggaatgacgtttgggacaggttctcatgacagtacaagattttgtatagaagagatagagaagaatatacacgagggcgacactgttttggacctgggctgcggaagcggaattctttcggttattgcattgctcctgggagcgtcagacgcttgtgcggttgatatagatgaaaattctgaaacagtagcatattcaaatcttgaaatgaatggacttgataagaacaattatcatgtttatatcggagatattattgaggacagcggtctacgggacaggtttgcagaatacgatattgttgttgccaatattgtagcggatgtgattatcgcactcagtccatatgttcgtagatttatgaagaaagacggaatttttatatgttcaggaattatcaatgaaagggcggaggaggtaaaatcagctcttgaaaaagccggtttgaagatagttgaagcaaagcagtcggatgaatggaccgcatatacctgtaagtgattgttttgaattttatttttacccaaaatgaaattaatttatattattgatgtaaatttaagattgtgccgaacgaaattgctgattatgatgtgtttcacacaagtgagccgcgttaggcgagcgctcgtttcacgcggggcgtgaatatacttagaacaatttgtaataattctttttaattataaacttttccgggactgcgcgccttacgaggcaaacaaagtttgccctccgatgcttgctgtatcacattttttcatatgaacttaacttttttgtccagtttttcgtagcctatccacagacattaaaggttttaggataaagagttatatagttcattttcattttcttaaaaaattttgttacatctcctgaaatttgaaaaactctaaaaatttattaagtaaaagttataaattaacgaaatctttaacttttcataataatttatttttaagcttttataaaaattttttctatttttatatatagtttaaacagtatcattgagaatctaaagaaatataaataacaaaataaaaggtggtaatagtgagcgtcggtaggccgcatttatgcggcgcgtaaggtgagcagcgcggacagaatataaaactaaaagttatactaatatattatccaacgcctactcacataacaatgtggtttgcggtcatatagcatattcaaattatttcgcatatacagattattaacattcgccgagagcacgatgtactctcggcgtttatattattggttaatatattgggtcctcatttcttctttaaaaaatagatttacaaaatccactgtactgtcgctgagtttttcttcattgataacttctctggcagtaagcgggtcgtcggtgagtatattgtctatgtcatatttgcagatattaataatattcgatggctcattgactgtccaaacaaacacttttttattattctggtgaatctgatctactatatcataatctataaatgtttcctcaatactgaacccatcaataaaagtcatttcagaaatattccctgcggccacagtcatgtcgtacagggtttttatattagggtcaatctctttgacctttttcagcgcttctatatcaagagaagcaagcatgcagtcgttttcaaatccgtttgcctttacaatgtcaatgacattcttttcgaaatcggtttcatgacctgttggctttatttctatattaagttttattttacctttgcataattttattacttcatcaagagtcggtagtctcaggtatgagtattcgtctgaaaaccacgaaccgacatcatatgtttcaagttcagcgtatgtcatttcccaaatatttttatctacgcctgatattctttttatattagcgtcatgggaaatcacaacaatattatctgcagtttggtgaacgtcaagctctatccagtcggccccttgttcgatcgccgccgcatatgccggaatactgttttccggataatccacagaactgccgcggtgggccgatatttcaggctcgttattaatattaaaagcaaagtcgtcaggagcgcctgcagctgtcagaatagtaaatcctataaaaataacagatactattcctaaacatacatagttgagaagtatgtgcttttttccttttggaggaatatatttgggaatcggttcctgttttttgtttttcagcttatagtatatgacgctgagagaagcataggaaatagtcaaacttaaagtttgcactgcaatacttatcatatctgcggcacggacggctttcagcgaatatagatattgcatatcgggttcgcagaagaattttataataagtattgagctaactgaaaatacggtttttataataaagcctataaaaaatataagcacaaccggtgcaactctgcccaataatacaataaaaaagttctttttggtcagcgccagactttttttgcttgctgatacaaaatttttcgattcaaagcagaagcatgtatagttcagagagaagcgaatagataatatgaacaatatagtatataagcaaaacattagtatagataaaatgttgctttcatatatgtaatcctgaataaattcagggattgcgtccactccggtgaatcctgaaatagcagtggtgaaaagcagggtatataaaaatatcaatataactccgcttttgaacggcttaaaagtacattttccggctagtttaaacatttgcacaattgaaatatccttctgattataagaagcatgaacataccaggttacagacataattttaaatattaccatcaggcagctcactaataaaaccgcaagccatataaaaattgtggcgggtcttgaaagatagtaaataatcttatcgtttgaaagatacgtgagtccggaaagcgacatcgttttatcaatagaaaagctgagtatcggatagataagaaaaactgttataaccgaataaataatttcaaatgccaatagagtgctcaaatttcttgacagcagctttagacaaagcctgcaatagttaaataattttttcattttgtatctccatatagttttggctgtttatttgaaaatattatatcgtattttattttaaaaatcaacttttacgtctaaattaatatattttgtgctgcaaataggttatattgattttactgtatatttaccgtagacaaataaataaaattacaaaatagccttttataaacagaacatatattttaatgtatattttattggaagataaagcagaataatccattataagctaataaaattttgttgtgtataatggagtgtgtttttgatgactatggatttgctaagagttgcggcagcctcggtaggttctattattgcattgtttgttttgacaaagctgctgggttataaacaaatgtctcagctttctatgtttgactacatcaatggcattagtataggttctatcgccgccgaaatggcaacaacggttgacggtagttttatgaagccgcttcttgctatgactatatacgcggttttagtatattttattgatttgctggctgttaaatctctgaagtttagaagattctttggcggcaggtctttggttttatttgaaaacggaaaactatataaagaaaatttgagaaaagcaaagatagacgtatgcgaatttttgactgagtgcaggctcttgggttactttgatataaacgatatatctatggcgatgatggagaacaacggaaaaatatctgtccttccgaccaccggcgcgcggcccgttaatgtggaggatatggataagaacatgcagggagttaatcctaaaaaaccgtcaagggcaagtataaatgttattttagacgggattattctttatgataatctaaaatacacaggtaataatgacatatggctgaaaaatgagcttggaaagcagggtatatcagacgtaaaaaaggtgtttttagcaacggttgatgaaaacaacaaactgtcagtatttaaggaactgagcgaatcgcccgataatgatttgtttcaatagggcttataaactattttattacagcatatataaaatgactcctgcttttgttggagtcatttttaatttagaagataaggccggtttcataaaacatacagcaatataatattaatttagtattgctataccgctactaatataatgttgaaaataatgtaacttaaaacatataagagcaggataatacaaatggaaagttaacagaaacttgccaaaaaatggtgtctatagcgaacatcggaagggtgtgcgtagcacaccgcgttaggtgagcatacatctcacgcaaagcgtgaacgtatttaaaacagtttgttatatcttatttagaaataaacttaaccgcggctgcgcgccttacgaggcagatttcatctgccctaccgaagcttgcaaacccatatttttatatattatctttatatttctgttagttttattataacctttacatattgtaagtggaagtcaacagaaacttgccccaaaatagtgtttttagtgaacatcggcagggtgtgcgtagcacaccgcgttaggtgaacatacatctcacgcaaagcgtgaacgtatttaaaacagtttgttataattatatttaataattaacttaaccgcggctgcgcgccttgcgaggcagatttcatcttcattgagtattcatgttattatttgcgtattcatattattctttgagtattcatgttattatttgcgtattcatattattgacattgaaggttaatcaaaacaagttattttgtatcacccccaccatgctggtggggtcacagacattgaaggttaaacaaaaaaagtttctatggctcacccccaccatacaggtggggtcacagactttgttggatgtaaagaaatgagtatgtatagcacacactttttaaaaaagtgtggtcacagccatatcgatgcttgcaaaatcatatttctattatatttgatctttaaacttctgataattttattaaaataaaaagtcgtcttattttatttattgtgatattgcttgtgaatatataaaagtttgacccaatatgtataatgttctgattttatgatttgctaaaccgattgacttttggtcagttatacagtataatattagtaagtttataagaattaaaattgatttgttcttttttgatttgtatttattttgtgttttgtaatctatcacttcttatgcgtcaataatattcgtcacaaataaatatttgtcaaagcaatcaagacgttttctttcagcaagattttattttatggaggtaagtaaatgaaaattaaaaaaacaattgctgccgctttaactgttgttatgctgtcaacagctgcttcaggggtatttgcttcaggggcaaatgaaaatatttccgggggaattaacggcggcgcagaggaaacccagagttatttaggggataatgaaagcgagttattggttagcccgtccccgggtatttttgacgataatgaggaaggcgcagaagacgttcagcctaccctttatcccagcggaatacaaacggcggagcctgatattaatattgaatcttccagtccggagccatatcctgagacaactgacgttccgtctgaggagccggcaaacgatgtgatgatttcatcgtaccaggttaatttcagctgccggcttgacggatggccgcgaaaggattatgctgtatttaatatatgttcggaagatggaaaaatccttgattcacacacaaagtatattactgatacggagagtttttcaatagattttaatataccggattctaaagtgggaactgtcttttatttggaggtaacaggcgttgattcaatagattattattcggataattatccggtgccgcttactgaaaagattccgctgtatacatattggtcggagccggatgaaaacggagacagggttccggtgagctcggcgcatatgaccgcacacgtcagaacacagtgtcctattaatatatacgctgacggagaatatgtctctctgtcttcgcctgctatatttgacggctcgtatataatagcaccgctgtcagagattgccggggcaataggcatatccgactgtacttacttccctgaatataatagcgtaaaggttaagaccggcgataacgaaatgcttgtcaatattggatattcgtatctgacagcgtttggcagcgatataaatctagaccttccggtttccaatattaacagcctgacatatatagaattaagaccgtttatagaggccttcggaagcactcttgaatattacgacaatggttcttatattgatataaaacttactaaatcccccatggctgtaagctctatagctgagcaggaggcaagaataaacgagagcggagttggaagctcgaccgattatcttatctgggtaaacaaagaaaagtttagatgcaccgtattctcaggttctaaaggcaattggaaatgggtaaaagattttactgtcggaataggagctgagggaagagaaacaataacgggcgtgtttgaatatattgactatacgaatatgtggccttatgattcgtattatgttggcccggttatggtattctacggcaattatgcactgcattcaacgtttttgaaatatgacggaaccccatatgataacactgttggggcgaagatttctcatggctgtgtgcgctgccaggcaaaatatataaactggatggtagataatatacctatgaagacccgtgtatatgtaactgaatcttaaaatattataatgagccggctgcaattttgcagccggcttttaatatccctgtaattctaaatataattcaaataaatgatatattgtggtttggtggttctgaattaagaatatactacctaaatttagcaaatcaatgttacattaagtcgtgtatttgttacttatttttgttatatcgttgattatacgtataaaagtaaaattattcctattttttcacttattattgttgacaagtgaaatgctttttgatacacttatttaggaaatatttttcagtgggagataattatggaagatttatacgaaaatgtcgaagattgtagaatattaattaacaacagtcagcttgatgatgaagttattaaactatgcgataagataaatacgaagattgatgaaaagtatggcagcgtggcgcggttctccagaacggttaacgtaccctattcaactttaaactgtattcttaaaaacggtttgtcaaacagtaagttttctatggttttagatatatgcaggcggcttagagttgatatatttgatatagaaaaatatggaattaaagctgcggatatatccataatatcaaaaatttcgtcgcttgatgagcgcggaatcggcgttatttcgggcattatagaggaggaatataaacgatgtataaaaattataaccaatagttgacaaataaatgtaattatgttagaatgaaataaaggaggtgttttaatggatgaactaactctgctgattaagcaagaaatcaaaaaacaatttcgcagtgtacgccaatttgcgttcagtgtaggaatcgcacagacaactgttgtcagcgctctgaagaacggtgtttccggcacaggatttagtacagtgatgaaaatttgtaaagctttagacattcaagtatttgattactctatcccgctcgtgatcaatgataacgtagtcacattacttaaaaagtataatgctcttgacaaattagctgaacatacagttcagactgtactcaacgtagagtatgaaagatgtaaagcagacgcaatgaagagctcaaagcgttagttttacaaagtttgtttagttgtggaatcttcgtctgtaaaagcacaggcaaatcataatatgtctttcagattgtggcatattaaatacaatgatatttacaatcttgactcatatatcatagccttgcagttgtttttactgcagggtctatggtatattttattttagtttattaagttaatatcaggaatcgtatccggataactgactgtagttctggattcaattttttcagggcagttttgggtcttaaagctgacattaatatttttaatttttaaattatctttatcaagcgtcagtgttcggttaattgttatttcatcttcgttgatattaaatgttcttttataatatgaagcatattggtctgatttatttaggcgctcagtaaatataaccgtatattcactgtcatcttgtgagaccgaggaaatctccaggtcttttataccgtttaattcaagtatatcgttgtaatcagataaatagttttgatactcatcataagttatatcagtttggttttcctgaatccctaagtggattccgctttcatcagcaggatccaaaaccgtatagtaatattccggggataatacgaaccaggttccgctgtttaggtccgcaccgtatatccatatatcgccgtctttgttttcagcgcagataattgactgggcagatttagtctctccattctcaatataatactgcgcagtagaaatttgagttatctccccgggcggtgtaagattttgtattgtattcacgtttaaaatatcttctgcagttagattatcacttgtagttatgtcgtttttttgatttgctgatgtacatcctgagaaaataataataattaaagaaataattattattattttagttgtagaaattttattcataattgtcacccgaatatttattagattacaaatacagttaaaactgagttgtttgccgccataaatgcgtccggtattttcttaaactatgtataccaactgtattatgaggaacatcatttattgaatataatcctgcgacggcgttgacggcaagtatattataaatgataaacttatgtgacatgagtttattatattgataatttatttatgagaaataattatttgaaatttataaaggcagctttttagtatgattgtaatcttacagtttgctgaattataaataaaacattattatagtttattttgatatagaatatgtgctctatattagtttgctttccaaatagatttgaaatgtaaaatatatagagcacatatttttgtgtacgtattaaatttattttgccgctttggcaacagcttcagcaactgcagggcttacgcgcgggtcgaaggctttagggattatatagtcctcgcttagttcctcgtcagaaataagtccggcgatagccttgcaggcagcaatcttcatctcctcggttatgctgcttgccatagcgtctaaggctcctctgaaaatccccgggaaagcgataacattgtttatctgattaggaaaatcagaacggcctgtgccaacaacgcgagcgccggcctctttggcaaggtcaggcattatctccggcgtagggtttgccatagcgaacacaattgcgtcgtccgccatagactcaaccatttcttttgttacaatgttcggtgcggacactccgataaatacgtctgcgtcctgcataacatcagccaagctgcctgtctttccgtcacggtttgttattttagacattttttcctgctctgaattcagtccgttcatgttctcgcatatagcgccgattttatcaaccaaaataatattttcagcacccatattcatcagcattctgcagattgctattccggcgcttccggctccgttaatgacaatctgagcgtcttcaatttttttgttaacaactctgagcgcgttaatgattccggctgacactactattgctgtgccgtgctggtcgtcatgaaaaaccggaatatcaagctcctcctgaagccgtctttcaatttcaaaacagcgcggcgctgaaatatcctctaaatttattccgccgaaggtaggagcaatattttttacggtttcaactatttcatcaacgtcattggtatcaaggcaaatcggaaaagcgtcaacgccggcaaagtttttaaacagcacgcacttgccttccataaccggcatacccgcctcagggcctatgtttcccagtccgagaacggcgcttccgtcggttacaacagcgacaagattgccttttcttgtgtagtcgtatacctttcttatgtcctttgcgatttcacggcacggttccgcaactcccggcgtatatgcggtggaaagctcgtctttgttattagtttcggcgcgggcggtaacttctattttccctttcaaacgtttgtgcaattcaattgcggctttgttgtaatccattttatcatctctccttgttcttatcatataatattttaagaccgtccaaggtgagcagactgtcaaccttgtcaatctcgtctgactctttagatatcattgtggcgagtccgcctgttgcaacaacagtggcgtcctctccgatttctttttttatacggcgtataatcccgtcagcttgtcctgcctgtccgtacacagcgccgctctgtatagcgtcgattgtgtttcttccgataaccgaagacggttttataatctctaccttaggaagcttagcggttttttcaaaaagcgcgtccattgagatttttattccggcggctataacgccgcctacatagtttccgttcctgtccaccgcgcagaatgtggtggcggttccaaagtcaactataacaagcggcggtttatacttgtgtattgcggcaacggcgttgactattctgtctgcgcccagctcgcggggattgtccattctgatattcattccggtttttatcccgggtccgacaaccataggcgtgcagtccagataacgtttaacaccgtttgtaagcgagtgcataacagtggggacaacagacgctatcataacgtcgtctatctcatctggttttaccccttcattcaacagaaattgtgttataagcataccgtattcatcgctggctttgtttttatctgtggccatgcgccagtgacggcgcagattatcgttttcatagagtgcggcaacaatgtttgtgttgccaacgtcaattgtaagcagcatattatcttcctatctgattcaattttttaatactttttatcttttattaagaataaattataataaaatatttatagtttcttgatttcagcgtttacaccgctgtcggttatattgagaaccgcataagagtatctggcacagcccggattaagcataagaatcccgtccgtttctctgataagagcgctgtgggtatgtccgaaaatacatatgtcggctttaacgtcgtgagctttctgtcttaatgtatacattccgctttttacattatagcggtgaccgtgggtcagaaaaatacgtttgccggaaaactcaaacagtctgtcataaggaacgtcgttaacgtaccaatcgttgttgccgagaacatactcaaatggaatatcagggtatgcggcggcaatgtcgtccgcgtcacgctgaatatctccggcaaaaattattaatgaaatatctttttcactttcaacagcattcattatgctttgaaaactgccgtgagaatcgcttaacactaaagctttcattaataagcctccgtttcagtaataataaaatattatagcacataaatatttttttgtcactatttttataaaaatacatacaatgtaatgtgaaaggagttgtatctaatatggacataaatgatttaacaaagggtgttaatcagaataatctcaataatactcttaaacagttcggaaacgtaatgtcgaaagatcagatgaaccaggtggtaaacactataaaaaacacaaatcaggagcagctgaaacaacagctcagcaagatagacccgaaagagattaataaggttctctcaagcaatccggggcttcaaagggcaataggctccaatcctgacgtgatgaagaagttgaacgctatattttcaaagaacgggaagtagttttaagtatattcaaaacttactctgaaaggtggcgattatatgaatgaagagcagaatatggattttgactttggttcggctatagaaaaaattcaagagatgatgggaacggacgacggacagtcaaagcttaataatataatcaacgcctttgtgggttctgatgaagataatgcgaacagtcaggaacaagacagcccgtttcctgatatggatcagatggatatgatgataaaactcggaaatgttatgtctgcgatgaagaccacaggcaacagcaaaaatgcggctctgctttacgctttaaagccgtacctgcgtgaatcaagacaggaaaagacggacagcgcggtaaagataatggttatggtaaaggcctttgctctgctcaaagacagcgaccttaatctgaacttttaggaggcggagctatgtacaaacgttatcaatccccgccaggaagcaaaccggcgggtaatccgagacctcagaaccatccccggagcagtcatcaggatatgggcggagaccgttttcagaacagctataatgatatgggtgataaccattttcagagcagtcatcaggacatgggagggaaccattttcagggcggtcatcaggacatgggaagaaaccattcccaaagcggtcatcaggatacaggaagaaattattctcagagcagccgccggaatatgggaagcggtcattccaatgcaggttccgggaatcgacaaaatcagagggcaaatcagaattatgacacacctcggcataattcgaacgataactttgagtatgacggacatagggatgatatgaactggaatcgggcggcggactataaccataggaatgagcctcggggagcgccaaacccgccggccggcggactgggaggacttttgagcggtcttttcggcggaggaaagtcaggcggaagaagagaagagccgaacatagtaaaatcaattttaagttttattcccccgggaatatataataccgaaacaaaaaaaattcttggcatattaacagcggaggatcttctgcttgccgctctcatactaatgattgcagacagtgacgaaaacgatgacctggcgctgcttatagctttggtatacatatttatggcataaaaaatagtgactattatcaaaataggataataaaaagtaattaaattgttatataacgccgttgacaataaattcgtttaataatataattaaaatagttaaataggcgtgttgtgtttttaggaatttattaaataatataagtgaaaatatagtttcagtattattttggaggttttatactaatgaaaaaggttttggggtgtgttttgctggcggcaatcctggtgatttgtctcggtatgagaggagttgttccggttgatgtcgaccaaaaggctgacgatactaaggtgacaatgtatgcggaagacggcaggagcgaacagtttgacccgtctgaggctgaagctcagaagagcgttggctggtatgataattttaatgacgtaataaccaccatgtggaaagatgacggaagcagtatagtagtgtttaaagctgatgtgtctaagtacgaaaaagacggatatactacaaatcatgattctatcttttcaaaggtttttaatccggctacagaggaagaaaaggacgttttgaaaagtgaagtgcagacatacattgataacggctggaagcgcggcaacggaaaagttgaccctgataagccaatggtgtgtctgacatttgatgacggaccgaatccggctaccactacaaaacttctgaaagctcttgaagaaaataacgcgagagcaacgttcttcatgctgggcaacctggttaaaaacgtcaagggcggaagcgatacaataaataaaatgaaggatatcggctgtgagctgggaagtcatacctatgaccatacacagcttactaaacttggaactgacgctttaaagaagcaggttcaggatacaaacgacaatattaacgacattgcaggtcaaggcgcaactgttcttcgtccgccgtacggctcatataatgataatgtcaaatcagtttgtcagagtttagaccagcctataatattgtggtctattgatactttggattggaagaccaaaaatgccgacacttcatttagaaatgttatggatcaggtgaaagacggagatataattttgttccatgatatttatgagccttctgttgaagctgctatcagacttataccggcactgcaggacgcaggataccagctggtaacagtatctgagatgggcgaagcgaagattggcggactaaaacccggagaggtttacaccgatttttgggacagcactgttaagaagctgacaaacagcagctcaagcagtgagaagagttccggtagctcggacagcgaaaagagttccggaagttcaaataatgataagaagtcaaacagttcaaacagtgacaagggaacaagttcttcaaaaagttctgattaatatatcttaaacgtaaaagtttatttcagactataatatgcaatgaatgagttttaaataccgcacaattacgtgcggtattttttgttaagcactgacaggggaagtaagtatattttgaattgaacttttgaaatttttattatagaatgaaaaaatttttagcgtatttattttagtattggaagataatttgaaatgtttttgccacgagttgatataaatgtatgagatttctattatgaagaggtaaactgtgtataatttttttagtaacatatttagaacaattctgcagtattaattgacagacaataaaaatataaataagaaatgcacataaataaggacttatctatatccggtatattatgtgcagcatttttaacattgaatgttcttagtttgattaattttttatttatatctcattgataattatcgaatatttttatgctaaaaaataaaaattaattattaaaaaacatatgacgcgttatgtcatttaatatgataatatagtcgtaacggaaaccggcttatttcctatttggagataaatatgagattggtctatgctgctgttgcatagataatgttatgaagaaacaccagacagattatagaataaatataaagtttaataaaaatagttaatatagttggtaagatagtaatcaagatagtaactaaggcagtagaccattatataaacaaaaccaaacaatactaaactaaactatacaaaacaaaacaaaactatttataaattatataattattttactttatattttcttttaaaatatgaagtgcacagaacaaatacataaaatagtagaataaaaaacttaatgatgaggatatagaataggtaattaatcttgcagaaagttataaatataataataaaagatattaacaaattcgtggctgcgcacctcgcaaggcgcataaatgcgtttgcgtattcaaattattatttgcgtattcatattattgtaggtaaatgaaaacaagttattttgaatcacacccaccatgctggtggggtcacagaccttgtaggtaaatgaaaacaagttattttgaatcacacccaccatactggtggggtcacagacattgaaggtttatcaaaacaagtatttaaggctcatacgcaccttttaggtgcggtcacatacattatggatttggtaaaacattttgttttgtatcacacctaccgatgtttgccaaaagaatagtttttataagatgaaattaataggaactcgaaaagcctgtattcacggttaaaaaattgtttgtcaaataataaggctcgatatgctgtgaaaaaggaataaaattctgaacaaaaagctgaatcacattaaagtgtaatgagtaaaataaaacatcagctttaacttaaaagtattcataggtttttattacatagaattgcataaacaaataattatgtatatttatggattatatactataagaaaacaaatttgtgttgactttctgatgtaagatatttataatttaattatgaaacagcgcacaatgtttttcgtgaaacattattgttctgtgcgaaaaataggatatggcgtcgtatgaaaaaattaattgggggtattcttatgagaaatgtaaacgatcaggataatagaccgtccggcggcggcaacggttttaacaccggccctgtaaatcaaaatccgccaaactatcacggcggacaggaaagggttggcggcaatgccaatattggcggaagcgttccgggatcgggagacggaaggtatacacctccgaatcagtttaacggatacaatcaatatgggggatataataacaatggatacggcggtcctccgaagaaaagcaatacgggtcttattgtggcaatttctattttatcaggtgtaattttgataagtattgcggttatgtgtcttatatttacaggggttttatcacccggcagacaggcggcaaatcaggcggtttccgttgtcgctactgaagctccaacaataagtccggctacagcggctccggctgctcaggcgcccgcagcgcctccggttcagaatgtaccgtcgctataaggtaaatcgtcagtatgtctatcgctggcgaaaacgctacgacggtacgctcgcctccttagccgataaatcacataaaccccaccatcatcccaatcagcataccgctgatgagttgaaattgattactgatatgcgccgccgtaatcccaatgctggacttgttgtgttttgggtacgctacgcgtgagatgtctgctcacctaacgagacgcgcaagcgcgtccttccgatgttcactaaaaaactccgcatataagaaaatatttaaatattttaaagttatataaaatgcggtttagcaagcaccggagggcaaacgcagtttgccgcgttaggcgcgcagtcttgggaccgttttatataaaacggattatgacaaattgtcgcatatatgttcacgctacgcgtgagatgtctgctcacctaacgagacgcgcaagcgcgtccttccgatgttcactaaaaaactccgcatataagaaaagggaaagttacaaggctttttcttttgtgcgtgaagcgcaaaagaaattagcgggggcgagcgccccttggagccgcaggcgacctaagcgagcagcactttttctttggtgaagcgtttctttttcttgctagaaaaagaaatggttcaaacgcctattataagtaaaataatatatattatatggggtcatatacatagtagatatatattatttttaataaacaaaatattatatatcaaatttataatatccgattctctttgcatataaccccatataatatatattattttacttataataggtgtttgtaccatttaattattactcaaaagactggttttgtagtgaacatcggtagggcgcatttatgcgcctcgttaggtgagctatcttctgaatacgcagtgttcaatatatcaagtaaatattcatattccttttttactctcacagtattctatctttcagcttttcttgcctcagccgaaagctttattatcttatcatattcttacccttcttgtcaatccttttttacccttaactttttacaaatacttaacctattatttatcacttctttggatattttgcatatttattcccattttgattatatatgacgttttatgtcatttcacttttacacctatttaacacaaaacagcgcttccattaaatgaaagcgccgttttgataaacacctttaaatattattaatctttaggaactgtctcccagtcttttaagaatctgtctattcctatatctgtcaaaggatgtttagtcatctgcattattaccggatacggtattgtagcaatgtgcgctccgcatcttgccgcttcaattgcatgaataggtgttctgatgcttgcggcaataatctctgtatcaattgcatggatatcaaatatttcaacaatttcctcaatcaaagtcattcctgtctgtcccacatcatcaagtctgccgaggaacggactaacatatgtggctcccgctcttgctgcaagaagagcctgtgcagccgagaaaattaaagttacatttgtctttattccctttgcagtaagttgtttaaccgcgcccaaacctgccggagtcataggaatttttataactaaatttttattgttaattgtcttaacgagctcttcagcttctttgaccattccttctgtatcaaggcttataacctcagcgcttataggaccgtcaactatggttgtaatctcttttacaacatcaataaaatttttcccttcttttgctataagagacggatttgtagtaacaccacaaattacgcccatatcatttacttctcttatgtaatcaacattggctgtatcaacgaaaattttcattgttttctcctcttcctgcagttaactgctatattttaattatttttatatttttctataaccgctctcacagtttcaacagcgggcccgcccgtcagttttctctgattcacacaggctgttagggatatttcttcatatatatcatcatcaaacaaagctgaaaaacttttaaattcctctattgtcagcgagtctataactttatccttttcaatgcaataagccaccattctgccaacaacagcatgcgcatccctaaacggcagaccgtgcttaaccaaataatcagcaacatcagtcgcatttgtgaatccgccttttgcaccggtcagcatagcatctttattaacagtcatagttgcaagcatctttgaaaataccggcaagcacatcttcactgtatcaaccgcatcaaaaatctgttctttatcttcctgcatgtccttattatacgcaagaggtatgcctttcatgacagtaaataatccaatcatatcgccatatactctgccggtctttcccctcacaagttcagccacatcaggatttttcttctgaggcataatactggagcctgtgctgtaagcatcatccaattcaataaatttaaattcgtgcgaactccatagaataatctcttcagacaatctgctgagatgcatcataacggtcgacaaatcaaaagctaactctaacacaaaatccctatccgacactccgtctaagctgttttgtgtaactgaatcaaatcccaacttctctgctacaaaatccctgtccaggtcatatgttgttccggctaaagcaccgcttcccaaaggcataacgtttaacctctttctgcagtctgttaaacgctcgctgtctcttctcagcatttcataataagccataagatgatgagcaaatgttataggctgagccttttgcagatgggtgtaacccggcattactgtttcaaggtgcttctctgaaatattaagtataactgactttaaatcttctatatcactaagtatttcatcaatttcatcacgcaaatacatacgtatatccaatgcgacctgatcatttctgcttcttccggtatgaagacgttttcccacatcgcctattctggaaatcaagatcgtttcaatattcatgtgtatatcttcggcatctatttcaaactctaccttattattctcaatatctgcttttatctcaccaagcgtcttaacaatcaactcggcgtcagcctcgggaattatgccttggcgacccagcatttctgcatgagcctgactccctttaatatcctgagcatacattctggcatcaaaacgtattgatgaattaaaatcgtcaaccaatgtgtctgtagattttgaaaaacgtccgccccataattttgccataatctttctcctgtacttcagtttatagtaatcaaattattttaaccttatttcttaaatttcttattcatcatagctctgaccttaagcggcagtccaaagaggtttataaatccttcgctgtccttatggctataaagctcatgactgtctccgaaacttgcaatatcctcattatacagtgaatatggagatttggttccggcaggcgtaacacagcccttatatagtttcaatttaacttcaccggtaacggtttcttccattgaatcaaccatagctgagagagcttctctcaaaggtgtataccattttccgtcatataccagctctgcaaatttaattgcagcctgacgtttaaatgcctgagtatccctgtccagacacaaaaattccaattcctgaatagcggcataaagaattgttccgcccggagtctcgtatactcctctggatttcattccgacaagtctgtcttcaacaatatccgcaatacctataccattttttccgccaagttcattaagtttttcaaccaatgggcggggatccatctttttaccgtcaacagaaacaggaacgccctgttcaaatcctatagtcacgtaggttggcttatcaggagccttttcaggcgatacacccagttttaaaagactgtcaagctgaggctcgtttgcgggatcctcaagatccataccctcatggctgatgtgccaaatatttctgtctcttgaatataaatctttctttgtaacaggaacatctatattatgcgcttcagcataatccacagcgtcttcacgagacttaatatcccatattctccaaggagcaataattttaagctcaggagccaaagcttttattgtcagctcaaaacgaacctggtcattgcccttgccggttgcaccgtgacaaatagcaacggcgccttcttctttagctatttcaaccagtcttctggcaataatcggacgtgcgtgagacgtacccaaaaggtacttaccctcgtatattgcaccggctttcaaagtcggaaaaataaaatctgaaacgtactcatcgcgcaaatcctcgatatagagctttgaagcgcccgctttttttgctctttcctcaagaccgtcagtttccttcccctgaccaacatcaccgcatacggctataacatcataatcataattctccttaagccacggaatgatgatagaagtgtcaagtccgccggaatacgccagaaccactttttcttttgccattttaaagacctccagtatttacttaatttactttatatctatacttcctgaatattatataacaaataaaattcatttgcaataataatttataattaattggaatatttttattatgaatcagattgtcaaaagttttatttaaaatactattaaaaattactctacgattctgtaaatttattaataaaaataagttacactatttcaaaatctcttatttccgataatttagaaagaaacttaatccttccaaattaatataaatttattaatttggaaggattaaatcttaataagttttaatttgtttcaaatattctctttataatatattgatacaattcatataatagaaaatttctttaaaactttttacaaaccaatttataacaaatgcaactagcatatacatttggcgtaataaaacagaaaagaccggattataccggtcttcttctgcttttaattttagaataataaaaataaagatcaaacacatcaaaacctatctcaacaggaaaataaaattaatagtctctattgtaacgcatttcacctcagcatttaatttcagaaaacaaagttgtgtatttttatcacggtattataattattgaaacaatttatttatatcaacgtttaacaatttagcaatgatataaatttctttatctgtagcaattctgaattgcccttctaatttcgaataactggtagaatttatattcacgccatttgactgaatctgtgcaataaaatccttttgtttaatcttcctttcagtcctcagtttagtaatgttagctcctactatattactggttcctaaaggatgcttacgagttttcataatctcacctctttttcttaaaattcttttttagaattatattgctcaaaaccgttgacataattccgtaaaagaattataattatttttgtaaaactaaaatttataaaacatataatttaggagggaaacaaaatgaaagacaaaattcaaggatttgtaattggcgcagtttcagcatcgctgctgataagcggcggagtatatgcttacagcggaaacaaaacaatatcagccgaatatgacaatataaaggtttatatcgacaatgtgatggctgatttgaaggacacaaacggcaaaacagttgaaccattcataagcgatggcacaacatatcttccagtaagaggaattgcgcaggcgtcaggtatgcaggtggaatgggacggcatttcaaacagtgtatatctgtggaataaactgtcacccggaaattcatatatggtagacaccatagagccgtatgataattcttttaattttcatatctacaaagcaagtgagggaaactcctttaagatggcaggagaactgtatagcaatgggtataatataaatccttactataaaagctggggtacatttaatttaaacggaaaatatgactctctgactttcacatatggtccggtaaacggttattttgaaggagaaagtgcgtctctaaatttcattgtggacggaaaacctgtaaaaacgatcacctgccaaggtgaagaccttcccgcttctgcaaccgtaccgctaaatcatgggcttcaattaaaaatagtaggggacggtgatttttggatgggtatggctgatgtaattttaaattaaaaatggcatactctatcggtgttacagtttaccgaaaagtcgattagtctattataaaggagaaaattttatgataaaaaaaggactgagtttgttatcagcattaagtgtgattattaacctatgcttgccactaaatatatttgcatataatgactcattttatacatatattgagcaatatggccaagcaccggaacacaacatgtatactcaaaaaattaatggaacagaaccaaacgggaatgaaggtgttgttgcttctaaaataatcgattttgacaatgacggacaatatgagttattaatattattattgaaaagggattactcccagaacaaaaatgctttagactttattgtggttgaaaacaatgacggagaaattgaggaacagtcgcgcataagattgtctgataattcatcctgcttaaatggatatagaaacgaagatataaaaattgtcttaaaagacaactatttaggatatgtctataaggagcaaccgtttgaaggaaccggctatacgtataaagtatgcagttacgacggagaagatataaatgtcttgactaatctatacaatccgggctatacttccggggtggcactatatgatgttaaaaattgtgcaaaagaagactactacgataaaggtatctgtttatttggaaatgaaggttcagataattatggagtttacaattcatatgatgaagcgattgcaaacaccatgtggcaatgcggaatatctacatattcaccggaatatgatatccataatttgtattttgataattgtgaattattgtgcagcttagaggctttcggaaaagaagactataaaaatggaacaatgaatgcaatttcaactattgtcagttattctgatattacaaaagatattaaagttgtgctcgataatgattatattctgtttgaccaaaaaccggtaatgcaaaatgacagggttatggtaccgctccgctcggttttcgaagcactgggatatgctgtaagctggaacgaaagcaccatgactgcaattgcttcaaaaggaagtgaacagatatttgttacaattggtgttctaaatattaaacacaataacggcacatatatcagcgatacggcgcctacaattattgccgacaggacattagtccctgttagggcaatcgccgagacagctgggtgtaatgtaacatgggatgacgacttattaactgttaatattaccaaaaaatagaaaaaactatatattcgattaattcgaactctttagtacgtaaaaaaagccaagcaaaatgcttggcttttttaaattattatataagatagaataaaaaagaaataaagaaataatttaaaaatatttatattactaatcttcttttatatactcaggatgaatctttttaagtttttcaagatcggtttcataattcgacaaatgatttgttattatatttgccgccttttcagcgtcgtgctcttttattgcatctgcgatacttttatgctgctgataaatttcctgacatctctcacgttttaaattcagttttctaatcctgtcaaaatgtatttgaatattatgtatcagctcataacttctgctcctatttgctatagccgcaagcgttttgtgaaattcattatcaagaccataaaactcacgtcttttattgtgttccaaacaaagcctctgtttaaaaagctgttcctccattggcatcaacataaaagaatcttcgatttcacacaatattctcgaaatttctttttccagtattaatctgagaaatcgagcctcctcaaccaaatcaaggtcaataagagaaataaacgtccctatctgaggtcttatttctaaaatattaaccccttccaattctataaaagcttccctgattggagtacggcttaaattcagttccttggctatttctgtctcactgattttatcccccggtgcaagttccaaagagattatattttcctcgagaacacgcaatgcgtattctctgtttgtttctttttcatttttctttggcgtgacagtcattaatgatacctccagacaaaacgcctatttattaataaatttccatagcaattctaacatataaaaatttttatgtcaataaatgaaaactttttaataggataattacatatatataagccggaagaaaaacttccggcttaatcttatcctaaatatttaatcagagtattttttacagcaccgggcccggcgtttaattccgaaaaatacttttctaccagctgacctaatcccacctcatataaatctactccgaaaatctttttatcttttaaaagcttttctattttattatgaatactgtctaagtcagtacagccaaactcaatgtctttcacaattcctccggcataatcaagcatagggtccgggcttggctcaaaaacattgccgctgtcgtctatacccattaaatatctgcaccatccggccaataccaatgggataaatttaagctcttttattttatcaagcttttcatacgcctttatagtttccccgaatcttatcggcaatttttgtgaagtatcgcaagctattctttgcggcgcgtcaggaataaaggggttcggaagcctttcatttattgtctcgtcaataaactctttaggtgaaattatacccgggtcaactactaccggcagtccttcatcatatcctatcttttttatcagtttaacaagattatcgtctttcatctcgtcactaattttattataacctaaaagacagccgtatattgcaagacaagtatgaagaggattaagacatgtgcaaactttcattttttcagctttatcaactgtctcagcacttgtataaattattccgccttcattaagaggaggctttccccctgcaaagctgtcttcaataaccaaatactgatacttctcagcatttacaaacggagcgacaaaagtatgctttttagtttcaacaggcgcggcattttctattccgtcagcttctaaaatctttaaaacctcatcagacggtcttggcgttattttatctatcatgctgcatggatatgaaacactatattgtatatacggcaaaaattcgccgtctgctaaaagattgttaacccaactcttagcaaactcataaactgattctttaagttttattccattatgggaacagttatccatactcaccagggttatcggtcttgccccattcttatatctatgataaagaagtgcggccaggcggcccatatacgtcttagcgttttcaggtcctttttcgaaatcggcttttactccgtcataaaattcgcccttagtgtcttttaaattataacccttttctgttatagtgaacgacgccatttccaaactctttgaagaaaagatttctttaagccgctccgtatcagtctcgttatcaaaatcaaaagttaaagcctccgccacgctggctataacttcttttgaaacagttccgtctgtgttaagcgttacagaaatagtcagattatcaaaatctttaaaactcttatctataatctcataatcataaccttcagctacaattatacctctgtccattatgcccttgtttaaaagtttctggcaaaccgccgccggaaatgctctgaaaatatttccggctccaaaatgaacccatattggattttctgaagttttcttaatcatttcgtctatattatactcaggcaaagtataacccagcttttcccactcacttttattctgaacaattgagcgtcttgacaatttcatagtgtttccccctactctttttcaatagcttccagaagtccgttcaggtatgtcgctcccaaagctctgtcgtatagaccatatcccggcatcgcaacctcgccccaaatcattcttccatggtcagggcgtataggaccgtcaaaaccggtttcatatagcgtcttcattattttatacatatccatagaaccatctctcgaaagatgtgccgcctcctcaaatttccccggagaatgatgacgcaggtttcttatatgagcaaaatgcactctgccctttgtcgccttgataatgtcacatatatcattatcagggttagaacctagagaccctgtacataaagttaaaccgttaaacttactgtctaccgcatttaaaagttttaaaatattttccttattatttattatcctcggaagattaaacaccggccatgcagggtcgtctggatgtattgccatcattatatcatgtttttcgcaaaccggctgtattttttttagaaaatatacaagattgtcaaacagatttttttctcctacatccttataagcttcaaacagctcttttacatgagccagtctctcaggctcccagcccggcattacaaatccctgactgttcgaatctatctgcttaaacatctcatccgggtttatttcatctattttatcctggtcatatgaaagtacagtcgaaccatcgtcacgcttttttgcaagctctgaacgggtccagtcaaagacaggcataaaattataacacaccagctttatatcagcctttgccaaattctcaagcgttgttatatagttctcaatatatttgtctctgtccggcagaccgatttttattgagtcatgaatattaacgctctctattccttctacttttaaccccgaagcttcaactttatttttcatttccattatatcttcatacgtccaggcttccccaacaggaatattatataaagttgttattacccctgttactccgggaatctgtcttatcttccagagttcaacgctgtcattgccctcgccaaaccatctcagtgtcattttcatattttattctcctatctgccccatcaatttattttattcgcaatgcacggggcaaacaatgcgaaagttaaatttatataaatttaaaatcccataagtctcggtaaaaacattgagattgccggaacaaaggtaacaagcagaagtaccaatataataaccccataatatgggaggagcggttttataaccctctcaatagatgtttttgccaccctaactccaacaaacaaaatgttacctacaggaggtgttattgttcctatacataagttaaataccagcataattccgaactgtattgccgtcattcctatcaaatcactggtaactaccggtaggaatattggcgtaaatatcaatattgccggtgtaatatccataaatgttccgacaactaaaagtataacgttgattataagcaaaataacaattttattattgcttattccaagcaaagcgtttgaaatcgccgcaggaatacctgtaaacgctaaaatccacgccattatacttgaaacgcctatcagaaaaacaatgataccggttgtctctgcactgtctttaaatattttatataaatcttttatctttattgttctgtaacaaaacgacagaatcaaactatacaccaccgcaactacagaaccttcggtagccgtaaatataccggcaatgattccgcctataacgataactatcaaaagcaaacttggtatagcgtccataactatcttcacagcgtctttagctttaacgcggcgattgcttctgtatcccttttttctggcaataaagaaagccaccaccatacaagcaagcccccacaaaatgcccgggatatatccgcccataaacaaggccgcaacagaagttcctccgcttaccaaggaataagtaatcaatacgttactcggaggaattagcagtccggtcggcgctgttgcaatatttgccgttgccgaatactcaacatcatagccttcctcttcctcaataggacctataattgaacccattgccgaagcagaagcgacgcccgaacccgaaatcgctccaaacatcatattagctactgcgtttgtatgtgccagagctcccggaaccctgccggtaagcagtaatgcaaaatttatcagtctcgtcgcaattccgcccttattcattatatttcccgctagaataaagaacggtatcgctatcaaggtaaatactgatattcccgaaaacaatctttgcgcgcctgtcaaaactgccgcgttgaaatccattatcggaaggatagcaagtatagatgaaataccaatagagattgaaatcggtactcctgcaagcagcaggacaattaaaactacgcccactattaaacctgaaattgctgctattgacataattacttatccccctttactattgctttttgtacgacagcgcttttattgctgataactgtctccttttttgcactcagaggtttaacctccttagcgcggagaagttcatatatatttattactccaaacaatattacaaaaattccgcatatcggaactataacataaatcatggacattggtattccaagcgaggctgtaacctgagtcattgtaagctttgttatgcttgttccgccgtaaatcatgataagcgccgcaaacaatataactaaaagctctgaaaaaatatatatccatcttagggcgtttcccgaaaacttatcagctagaaaacccattctcatatgttctctttttgcgaatacgagagcggcggccagcagcgccagccaagtaaatgaatacgttaaaagctcttctgaaacggtactgggtgcattaaatacatatcttgttacgatttgatatgttcctacaattgttataaacgcaaacattatgacgcatataacctcaagaatcttagtcagaatatttttaagtttaatcattactgcccgcctccttttgtatagcatcataaataggacgaagctttggattttcatttaatatttctttatgcagaggaagaactttttctctgaaagcagtaacatctacttctaaaaattcaacgcccattcctttggcaatatcttttgcttcttccacagcgtcactccagctctcacgctcagctctgttgcacacctcagccgcttcatcaaatacctgtctttcctcaggcggcaaatcctgcaaaaactttaggtttgcgataagcatatccggcaccatctgatgttcgttatagctgtaatactttgccacctcaccgtgcttattattagtaagcgcaagctcattattttctgctccgtttataacgttctgctgtattgccgtatatacttccccaaatgacataggagttgccgaggcgccaaaggcttccatcatcttaacgtttgtcgggctttgctgaactcttatctttttaccctttaaatcatccggcgttctgataggggtagtggcgtaaaagtttctgactcctgcgtcaagccatgtcaccgcttcgaatcctgacgcgtcagtagatgtaaaaattcctttcatcatctcatcgttttccattatgctgtgataatgctcttcactgttgaagagatatgggatactgaatatttggtaaatatcgtcaaaggtttcaagatttcctgtgctggccacgcagtaatcaatagctcctgtctgaaccagttcaatagccttaaccgacgctcccaaaatctcattggggaatatttgaatatcgtacttgtcgccaagtcttgactcaacatattcttcaaatgcgagaagcccaatatgatcaggatgcgtctctgactgtgaatgtgaaattcgaactatccgcttgcctgaaaatgcggagccggagcagcccgatacgacgaaagccgctgccgcaattaaagcaaaacttagcattaaagccgtcaagcgttttaactttttcataatctttctccccttacaaatttagtatagttgtatacttttcattctagtatacaagtttcttacaatgttattctactaccttaacacacatatgtcaacaggtaaaagtcaacaaatctgttttcctctttttagctataattaccacaagcgttttaaatatggctcggtataaaaaatttttattagcctttaagacacactgttttgtattttacatacatctctatggttaagatttagcaattcccattttataactttacattttaatcttttccatatatccaaaaatacttatcatattatttccaaataattatattttataagcatgtgataaaatagtttaataattgaatttatagtttcaaacagataatattgacgttataaccacagcatgcttttatctaatccatgagataaaaaattttaacttttattaagactttaaaattcataataataaattagcgggaaatttactaaataaattttcttgccaaaaaactagattagcgcgttaacattcaataaaaaatttaataattataaaagtaatagaaaaatataacgtaatagtgaattagagtaaataataacattttaaaactacattattaaccaattaaactaacttactagataaatggatattatggattaacattataaaaataatcagacgtatataaaaagactttaacgcgctgctcttcagataaaaataatcaatataaaataatcttatatgtacggaaataacaagtaagtaaaaaccttattttatataaaccttcagaatccgcaataaatcaatataaatatttttatttcaatttcagcctctttttaaaaaaataactattataaatatggattcagcaacctttctaaactattaagtataaatttgcacttgtcgatacagcactctttttaaactactatatacatttttataaagttatcaattcagcactctttatagactattatgtatatcttttcagctgttgattcagcaatctctataaacaatttaaatcgcaaataacaaacgaaaaggttttagcgcccgggtctggcgggcgcaaccgggctaggctatacaaagtaacaatataaaacaacaagatcggaatgttgtgaaattatattaatgataatattattttaacgtagtataaaaatcagaaaatatttacttgataacttaaccccatttaatatctatccattttattcgattgttgcctagcccggttgcgcccgccagacccgggcgctaaaaccttttttgttatttacaattttaatttcggatgttaaagtaatattatttatctttattccagatattgaactcaaaattaaactcattatattacttaaaactatttatatctgttcaatacaaataataaaaccttatatgttatcgtgtactttttaatcaataaaaattgaaactatataatctcccgggatataacggataaattattagatactaaaaaaaccttttgcactggctgctgccataacgcaaaaggttttttatactttattataaaacttttattttacagtacctaaaaagtccatttctgtctcatgcttcttatcacgtcccataagatttttaagcgccatgccgggagccattccctcaaacagtaccttataagcctcgttaactatcggcatctcaacaccggctgaatcagcaagctctttggccgcatggcaagtctttattccctcaactaccatttttacctcatcgcgcgcctgctcgggagtttttccctgacctatcaaaattccggcgcgtcggttcctggaatgcatacttgtgcaagtcactatcaaatcgcccacacctgataatccattaaaagtctcgtgctttgctccgagagccacacccaaacgagacatttcaaccaaacccctggtcattaaagcggctttcgtgttgtctccaagccccataccgtcaacaataccggcacataaagctattacattcttcaaagagccgccaagctctacgcccagcacatccgtgttggtataaaccctaaagtttggattcataaaaatatcctgtataatttttgcggtttcgcaattttcacaagccacaacatttgtagtaggtatatctcttgaaacttcctcagcgtggctcggtcccgacataacaacaacttcacagtttggaatttcttcttttattacttttgaaagtgttgagtgcgtcccctcttccaaacctttggaaatattaacaattatctgcccgtcttttataaatcccgacatattctttgcggttgttcttatagcatgcgacggagttgccgttacaataacatccgcatcttgacagcactctgataattcagaagtaaaccttacgccgtccggaaatttaactcccggcaaaaacggcttattttctctatacttttttaaatcttcgctttcctcttttaagtaagaccacaaggtaactctgtgaccatttttcgccaacattatagcaacggcgcttccccagccgccgcttcctatcacactgatatttgccataatctcatcctttcttgcttcccagcttattttcagtaccgtttaccaagcgctttatatttgccctgtgcataaaaacagcaagcacagccaaaatcacacagaatagtatatacgcaatatctccgcctccgaaaattaaagacaaaataactaacagaactgaacctaaaatacttccgagagacacatatttggaaaccgccataactattaaagcgaaaaccaaaactattaatcctatccaccaattagcaaacagcatcgcaaccatagaaaccaaaatacccttgccgccgtgaaatccaaaatatatagggaagttatgccccaaaacagcgcaaacgcctgcaacataaaccggtgtgtttccatatacactgtcaatcccagtcatatttgaaattaacattgcaatcagaatcgcggcaactgcctttagacagtcgcagaccgtcacaattgccgccgcctttttgccatatgttctcagcgcattagtagcccctgcgtttccgctgccttttgttcttatatcttcaccgccaaaaatacgtccgactattatagcgctgcttacgcttcctataagataagcaattaccccaattgctatcagccacaatatttccattttactctctccttagttttctatttcttcttgcctttttctcttattataaacttgattggagtgccctcaaatccgaacctcgctctgaactggttttctatatatctgacataagaatagtgggcaagctttgcgtcattgacaaataatacaaacgtgggcggttttatatctgcctgtgtcgtatagtatattttcagcctctttcccttatcgctcggcggctgaaccgctgagacagcctcgcccaaaacatcatttaaaatacctgttgatatacgttttgtgttctgttcaacaactttatccatcatctcaaaaaggctgtccaccctctgacctgtaactgccgaaataaacacagacggggcgtacatcataaaattaaagccttcttttacttttatcttaaagtttttcatggtatttgtttctttctcaaccaaatcccatttattgacaacaactatacttgcctttccggcttcatgaacatatccggcaatcttagtgtcctgttcggttatcccttccgctgcgtctatcattataagacaaacatccgctctgtcgattgcattaagggaacggctcacactgtatctttcaacattctcatttatacggccgcgttttctcataccggcggtatcaatcaacatatatttttttccgtcccgttcataaaacgtgtctattgcgtctctagtggttccggctatatcgcttactataactctgttctcaccgagtatctgattcaccaaagaggattttccggcatttggtttaccgacaatagcaacatgtataacatccgactcgtcgctgttctcgttatcctccggaaaatactgaactatctcatctaacaaatctccgacgcccaaaccatgaacggatgaaaccggccaggggtctccaataccaaggttataaaactcgtatatttccattggcggatcaccggggttgtccaccttattagccaccaatataacaggcgtgccgcatttctgaagcatagccgcaacgtctttatcagcagcggtcatgccgtctttgacgtttaccataaacacaataacatcagccatatctatagcgagctcagcctgagccttcatctgctccagtattacgtcatcgcttccgggttcaattccgcccgtatctataagggtgaaatccctgccgcaccattcagcgtcaacatatattctatctctggtaacaccgggcgtatcctcaattattgaaatacgtcttccagcgaccttattaaaaaaagtggactttcccacattcggacgtcctacaacagctacaacaggtttcatattctgcctcctcaaagcctaattctatactgtagtataccacaataatttccattcatcaagaatttattttcaacaaaaaacaccgtgcgccgagcacacggtgttaatcaagccaaaattattcgccaaccgaaataacttcttttcccttataagtcccgcaggccttacaaaccctatgagacagcttgagtgctccacactgaggacactctaccatacctggtacagaaagcttccagtttgctcttctcttatctcttctagcctttgacgtctttctctttggaactgccatttatgccacacctctttccaattcatcaaatatttatgaggaaatcctcgaaacagtgttacttaaagaaacgctgcattttctacttattaactaatctatgtccaaactgttgagtatatcaaacctagggtcaacttcccttgtatcgcatgaacagctgccgttattaagattagttccgcacttgaaacataatcctttgcagtcctctcggcacaaatgctttatcggaacgttaagaaccatatttgaatatacatactcgtccagcgaaattatatctcctgataagtaatttatatccggattttgattttcttcatcctcagagtcggaaaatctttcaatttctttgaatctttcagatatattaaaattcatctcgcttgagaactcttccgcacatctgtcacagacaaactgaagctttgccgtgccttttgcttcgagttcaaaagttcctccaaaattacgaattactcccaaaacttttacgggctccagtatcttaaaatcatcaccgggcattcccgcaatatttacttcacagttaataggtatctctttaccttcataattcttaatcggagctatattaatatccatttatatcacctaaatccctaaagaaaacacaaacagacagcgattattatatctaatcacggcctgtttgtcaatatctttttacaaatttcttaaaaaatatttaaattcacgctattttgaagccaagtaactgttaatcttgccaaccaactcgtcacaatctacaccgtgaaccatgcatgcctgctcaatgctctcaccgcttgaagaaggacagcccaaacagtgcattccgatttgaataaagaaatccgctgttcccggatccatctttaaaacatctataataatagtatctttggtaacctgatttgccatatatattaactcctttcaaaatctgtagctctattataccctattttcaataaaaatcaagagtattttacaaacttttcagctattccagtatttactacattaatcatttaacagcgtccacagcatgttcccaaattgtatgagctattttatcagcttcattgtattcttcagccatagacgtaagctgtgaaaaatcgccgttatccgctgcttccactctggatttaagaccttcaaaaatcttatatatcgttccgacagtttttgtcagttcatcatgagcttctttctgatcttcaccgcaaagcatagctgccgctcccacttcactgtaccagtgttcagtgctatcaagacccttttcatataaagctttccactctgcgtagttatcctgtgataagcttcctacaccgtttagaaccttatccatatctccgttcacaaaggctcctacctcgtcagtaaatgaattgatatagtttatatacttgtcccctaccaaactgcctgaactgctgttttgcgaagttcctgatgaatcaacactcttttttgaagatgtatcaccgtttccgcagctgcttaaaacacttgccagcattataactaccgcaccaaaaacaatcatattttttatatttttcccaaatttcatattttgcaccattcacctttcatgatgatattgttcattataacacatcgccgcataattgacaagtttttacaccgcactttttattccggctaaccttgttttgataaacctgaatatagttatagctcccgtctttattacccaccaaagcatccagaaaataaatgaaccaagataggctgatagagttatagtccaaaatctttgcactacattgctcatttttatttctgtcaaaagataatcattcagccataaaattatcaggcaatgcgatagataaatgttataacactgggaatccaaagctcttgtaaaccgggtaagctgttttcttttgtcacatatccaacagaagaacataaagaaaaaaagtattgccgatgtacaatagagaatatgtacttcttccatccacggtacagccatattgtatgtagcatacgccaaataaatatccaggaatcctgaaaataagaatagtgctgtaattaaaatttttcggttcagtataatctctttaaacttttgataattcataccaacatagcatccgcatacccagtataacaaatattttgtaaaaataacatcagagaactggaacacatgattcggcaagattatgtatagtatattcgataaattatatcccaaaactaccgagattaaaaccgaaaaagctatcccgacagccggagtgacacgccttaacgcatagacccataaaggcattaatatataaaactgaactattataataacaaaataaaagtgacccactaaatctccgcgccaccacgcatgaaacagcccgtcccacgaaaattcaaaataatggtggtttacaaaaaaaatataaaatataaacacccacaaaagataaggtaaaatcactcttgttatacggcccttgtagaatttaacataatcaatttttttatctgtcaagaacagcttcacaccgctcagaaaaataaatgcaggcacaacaaaagtgctgaatctccaaggtataaagacagcattaaaagcagtatccaaactggtagtctcaccaattatgactgaagcacaatgaataaatataacaagaaacgcacaaaaaatattcatatgcgaaagttccggtttcgctgtccgccgtgcaatttgccgtcccatcccttattcaccacctgttaaacagatatattattttaactagttagcgtttattctgcgcctttcgctcctgagctcaccgcgttttttagcgagttcccactccattttatcctcgtcagtttcaagtataagcccaggaacttcagtcggtctgtcatcatcgtcaagggctaccaaaaccaaataagctttattaatggttctcttcatgccgttcaaatcttctaccatagtgcggacgcacacttccattgaagtccgtcccacatgggttacttttcccgcaagcaccaaggtatcgttcggatatgccggcgctctgaaacagagagtgtcaaccatagccgtggttaccttgcatccgctgtgtctcctggcaacaattccggccacgacatctatccactccatcagtcttccgccgaacaatcttccgtatccgtttaagtcaggagacgtaaccatttgcacttgttcagtatatgaatacgaaacttttctatttttaactacaggttctgccatttttttcatctcctcttgaattacagaacaattcactttagatagtataccattttcaattcaatatatcaacgtctgtaatattattgttaacaattcatatcggcaaatttcatagaaatattgataaattctgctctttatgatatattaattagaaataaattaatgaggtaatcaaatgaagcaaagcgatataaaaacaccatattatttaattgatgaaaatttaattataaaaaatttagagattttaaaaagtgtttccgacaaaaccggagcaaaaattctgcttgcacaaaaagcgttttcaatgtattcattgtatccgcttataggaaaatatcttgccggtaccacagcaagttctctgtttgaagctaaactgggccacgaagaaatgccgggcacagaaactcatatttacgctccggcttacagcgatgaagatttttctgaaataataaaaatctgtgaccacatagttttcaactcattttcccagtggaataaatataaaaatattgtgtcaggaacaggaattgaatgcggtataagaataaatcctgaatattctgaaattgaaactgacatatataatccatgctttaaaggctccagaatgggagtcactttaagaaactttgaacacagcaacctcgacggaataagcggacttcactttcacactatgtgcgagcagaattctgacgttttatggaggaccgttcaaaaagtagatgaaaaattcggaaagtatataaaaaatatggaatggataaacatgggcggaggtcatcatatcacaagggaagattatgatatagaacttctgtgcaaatctataaattatttttctgacaaatatggtgtcgccgtctatttggaacccggagaagcagttgctctcaatgccggatatttgacatcaagcgttatggatataataaataatgaaattgatatcgcaatattggatacttcggcagcatgccatatgccggacgttttagaaatgccttatcgccccaacgttattgacgccgggaatcccggggaatatccatacacttaccgtttggccggtccaacctgtctggccggtgatattatcggtgactactcctttaaagaacctttaaaacccggtgataaaatcaccttttgcgatatggctatttacaccactgttaaaaataacacttttaacggtataaacctgcccagcatagttctgagacatcaaaacggagatacggaacttatcaaaacttttgggtatcaggactttaagtcaagactataaatttaagataggaaattgttatgaaagagaatatgcaagaaaaaataattgattttttaataaacaacggcgccggacaagtgggattctgccgcctagacaacgatgattttggcacaaacgattttaatttaaaatatgccatatcatatacaataccgctgtctgacgcagtagtggagcagataaacgataaacccacgcatacatatttccaccactacaggtcagtaaacacattgattgacaataactctttaaaaaccggtctgatacttcaaaaagccggatataagtatgttcctgtccctgcctctcagtccgtcaatggacttaaaggaatattttcacataaatatgcggctgtaaaagcaggtttaggctatatcggcaagagcggtctgtttatttcaaatatcaacggacccagagttcggctcggaacaattttgactgactgcgcagaatttgattttaatacaaatattttagaatgccaatgcggaagctgtacgctttgcgtaaaagcctgccctgcaatggctatcacaggtgaaacgtggaatcccggggaaccgagagaaaaaatcattgacgctctggcgtgcagccagcatatgaaaaaagcataccaaaacataggccgcggagttgtgtgcggtatatgtatgagggtatgccctaaaggattttccaaatccacagaataatatgctaagctctgaacctatatcctgcgccccaaacggtttcaatgtacttattttcagagttcttctcaattttgtctcttattctttgtatatgaacagtaaccgttgaagcgtctccgaatgcttccaaaccccaaacgcggtcaaaaagcacctctttgttaaaaactatatttggattttcaagaagaaataaaagcaaatcatattcttttacggtcattattacttctttgccgtcactgaacacccgtcttgaccctttatctactttaagccctctgatttctattatctccggcttcacagcgtcagagccgcttctgagggtcttgtatctcgaaatatgggttttaactctagccaccatctctgaaggagagaaaggtttagctatataatcatcagcgcccagtccaagtccgcgtattttgtctatatcttcacttctagcagataaaaatattaccggaacatctttaacctttctaagctcaccgcacactgaaaacccgtcgcgccggggaagcataacgtcaattatcacaaggtcataatcattttccaaagcctttttcaacccggattctccatcatttgccaactcacattcaaatccgttggctgacaaataatccatctcaagttcagctatacttttatcatcctcaattattaatattttcatataaaccaatccttttgtcttaatcttccaaaatatactttttcagtcttatataaacagttactccattcttatcgcctccggaacgcatccatatctttccgccgtgttcttttattattctgcatgctatagaaagaccgagaccattacctgaaacgtttaaatttcttgccgggtcagctctaaaaaacgtctcaaacactttcttttcttcctgcttacttatcccaattccattgtctgaaaaactcaaaattacccaaccgtcattttctattaactcaacacttagttttccgggaatatcaggctttctgtattttatagaattgcttattatattggaaagcaccctgtttaatttttcacagtcaaaccttacatatatttcttcacagccgcttaaattttcaccaatatcaagctctataccggctcttgataaatcaattgagaattcctccagcactgaacgcacaaaacctcttatatcccaaacctgtatatcgtacggcgcactgtctaaatccaacttagaatactccgaaagattatttaccatagcctcaagggtattagccttagtctgtatcgtgttaagataacgctccaacatttccggcgtatcggctactccatcctttatcccctcaacatatccttttattgaggtaataggagtttttaagtcatgcgagatgttggctataagcattctgtgttctgtctctcgctttatttcttcatctacagattttttcagcctgactcttaagttttcaatcgaatcatagacttctttaatttcacggtcacctgaacatgtaaactcatagctgaggtcgccttccgtcaaatgttccatagcgccggacatttttttaagcggcgctattatactttttgacagatatgccgttactcctatacaacaagcaagaacaactacaatcaatataaaaagccaaaccagcagcaatctaaaaatcataggattattaaggctgggagtaataccgttaatttgaatagatatacttggtacataacttaaaacaagtacgaaaataaatgctgatatgagcaccataatgaaaatcggcaataccagcattacaatcgatgataacataagtttctttttaattgacatatatccgcctccgtaatccagcggtttatcttatcagcattccttaaacctaaacaaataataacctacagcagtaaaggttaatccgtaacccagcataagcaaaattttgctgaataatgctgatattggcagtccggcgcctaaccacagtttatgccactgcatatatccggtaaatactaatccgcttagatttgaaaaataaattcccagcacattcaggcctatatatactattatagccaaaaacatcgcaaatgtcgagttttttacaagctgatttatcataattgtcataagcgccaaaactgccaaaggcaccatatccaaaatatatgcccatactgcatatcctaaattcactacgcttcctgaaacaataatatcaaatatgcttgaagatatcagaactaccgccatatttacagcagctatagtaataactgccaaaacctttcctacaaaaaccttatatcttgctgtggggcgcataaacaccgcgcgtatagtcttgtcctgaaattctcccgcaaacaggtcgcacgaagcaagcattataataaatggaactatagcctgaacgaacaacgtcatgagcgaaataggagaacttatattattcatggtccaagttccctttgaaatagacgtcactatcagttttgaaaataccgctacagcgcaaatcaaaatttctattattataaaaactatgtattttttactgctcataagcttagcgcattcattcctgtaattagccagcaatccactcatattacacgcctcctttcagtatccttagcgtcgcctactatagaaagaaaataatcttccaacgaagggaaattttcaagaacttcctccatactgttcatagccagcagtctgccgtcatatataactgctaccttgtcgcatagtttttcaagttctgacgcaacatgtccggatattaaaaaggttgttttatttttttcagacatttctttaataacactgcggatatgaacaactccttcaatatccagcccgttagtaggttcatcaagtattacaagtctaggacgcggcaaaagagccaaagctatcccaagcctttgacgcattcccagcgagaagcttccggctttatccttagagtatttatcaagacctactaatgacaaagcattatttatagcctctgtttctgttcttttatcaggatatttataaaacctagccgcagcttttaaattctgataagcgctcattctgtcataaagtgccggagtttctatcaagcatccaacactctccattgcagattcgaaatcatcatctatatcatatccaaaaatctgtatttcaccttcgtcaatcctattcatgcctattattgatttcatagccgttgtttttcccgaaccgttaggacccagcaaacctacaatatcaccctcattaacattgagggtgatattgtttactccgcggccgtttctgaataatttttttaagctatgaactgatagaacagtattattcttattatccatatttaactgcctttctgattcttaaattgttatacacgcaccgtttttcttatgccgcgtcattaaccgcttctgagctttcattattcactacggtaacaacatttccgttttcatctctaagttttccatcgctgcttacagtataagtcgaaaaagtaccgtcttcattatttgcttgaagattgactgaaccgtttatatcgccttcaacatcttcatcactttctgttatagtcatatgacctgaaccgtcttcttccactgcatacttagttgttacgcttacagacatatcctcatattcatcagcgttcactctctcaatgctggttgttccataatctttaaatgcagcgtctaaactcatatttaaattcttctgagctcctgagttgtcataacctgtcaaaacaactttaccgttaaatgcggagattcttccggcattatcaatggatacgctgccgcttattgtattcacgtacggctcatttttgttcaggaacatttcagacattgtctggatattaacgttttcttcatcgaagatttcattagaattttcatagtttgctctcaatgacgcgttaaataatgaaaatgctgctgtcatatatttaggaagctgttcccctgtcatgttaattgtataagttctgtttccgtcatttgaatcagtgagaactatattattttttatgtcgcctattaaagtatccgccaaagtttcaaggaagccaatctgtttatccaaaacttctgtattcgtaaacaactcttcagaaatatccctgtcactcattttgtactttgttttgtgagtctccggaccttcatcggtattataagtgtatgatgataatctgtaaccgtcttgaatagtcattaaattgtcagtatccaccagtgttccggtttcatcatacgattgtgacgaagtctgcatttttacatccccgccggcatctttttttatcagcgcttttccgccaaaaagatttgagccttccaaatcagctgaaacgtttatatccgcagtaacattgtcagaagagaaaaaggtattttttgcagcttctttaaccacgccatatccattggcgttgtcaaaattagcaaataccgccattcccaggactgcaactccaacgcctatgcacgccgcagctcggatgattctgtttcttgtctttttcatacatttgcctcgctttcataattgatagattttttgttttgagttttgagtttagatttaacatatgtctcaatctatgttaagagtataaatcccaaaaattgaaaacaaataaagcaattataaaatatttataaactaaaataaagtttttattaattgatacattaaaaacactcccccgggaaaaatttgatattatccgccaaaagttagacacttatagagaggtatatcagttcccggaggaattaactatttacttatactgtttgaaataggttctattccgtctgttgagttccaaacaaacaccttgatttcattggtttccgatacggctaatggtatgaatatattggatgaatctccaacattcattgttatatcactggtttcaacagcggtcaaagcccctgtctccctgtcatacgccgctgcaattattacgttcgatccgattccttctttattttttgttagatttatatttatgccattttcagcttccgctatcgaattcaaagtatacataaattcagaagccggctgaactgtaggagttacttcaggaacctccgaacccccctggacacccacggtaatattatcaatacctaagctgtttgcagaagaaccacgagtagaacattgaacttttgtaggcaaaagctgcggaacctcatcaatttttttagtaccggagccaagcgtaaccgttcctctcaatgtatagtcagaactgtcagcttctttagtataaacctttactttattatcgctctttgtatattcaagttttaagctataccatttattaggactgaaactaaatccggaaatctgagtatccttaggctttgtagcggaagcgcccatagagaaataatcatttaacttcagcgttccgccttccactgtcatcacttcaaacactctgccgtctttagcggtagtatatgtattatccgggttggcgttatttgaatcaaatattctaaacagcggtgtatccttagctgtgtctccgctcatgaaatcttcttcaaatattatcttatctccgtctaaaacagtttccggcaaatatgaccagccgtcctgaccggcgcctttatcagtaaactgaatatagttatttccttcagctctttgggttattgcaggcggcacagcgccgtcagcagccgatgttccgaaatctatatttattgattttccgttattatttgagatagtattattatcatcactatttccataaatatcccctgactttagattgtcaaaatcccagctttgtccaattataggagcgtctgtcggtaatggtgtagcagtgggttcagctgttggtttagctgtaggtgttggttttgttgggtcaagtgtcggcggcggtgacggcggagttacagaatccgcccaatacaatacatcttttaccttcggcgaccaggttacattgccggaagcaatcgaacctatctcaagagaactaaagtctgcagaatcaattgatatattttcaatagtatatccattctcaccggaatcgtcgctcaatatcaatttagctgttccatttgttaaatcaagggaaattttaattctccagttcgaagagcttctcttggttatattgggcgagccaaagactgttcctgatgaaatatttgtttttgctcctgttcctgaataataataggcctcatttgcccctgattccgaatattcctgacctattgccaaaactgttttttctgttgaatccaatagcttaatctcataagtataagctcttcctgtccaattccatgctcctccggcgtctttagtaccgcctgttccaaatgcaaattccagttcagcattaccgccgtatgccgtttcaaaatcagctttgaagcttctgcctccatcagagctgtcttgtgtaaactgccactcttttgaacttgagaaagttaaagctgctccttcgcttccgtcatatacaaattttgaacctgtttcgtcattactgctgtcgtatatatactgcttagcttcaagaactacttcaagcgcagctccgctgttttcaggcacttcaaatgcccctttactcaatatatacctatctagttctacctcataattatgggttcccggaagcagtcttgcagataccattccattttcatcagttgtcataatctgactgtctattttaacactggcgcctgaaagcagatttccgctgctatctttcacggtcactacactctcaggaagcggcgcatagtataagttaggctgaacatattctgaaatatctttatcataacctatataatagctttgatgcggaggctgattgtaagcagtattctgccaagctattgcactgcggtactggctgtcgtgcataaatgttgtaaatttatagtcagtcggactgagagacgcaaacacgcgaagtgctgagttatcggaatgtcttaatataatttcctctctccaatcgccgaacaaatcggcctgcagatttgggttggtttttgtgctgttaataaactttacagaattattagtataaatagtccagagtctgccaaacgatagggtatcgtcattccacttacttattctgtcgccgttaaaatgctcacggtacaaatccccgtcccaataaatcggaaagttaggatatgatccatcatgcaaagttgttttgctgattaattcgccgccaatagtacgtacaccaaaagctgcatcccaagcgagcactccatatttaggactaaaataatccattactcctcttccgtcgtcaccgctcgctttaaaatgccatatctcttttcccgccgcatctctaaatccggttccccagttaggtttttcttctaaaactccgaaaatttcctgttttccgtcattattaaagtctgaaacgtgaatagcgtctccatgtccccatcctgttgaatgagccaccgttccgtcattatctatagcagcgctgccgtatactatctcatcacagccgtcgccgtccaaatccgctacggaaacattatggttaccctgtcccgcaagactgccgtaacctgagaccgtgctgtcacatctccagcgcttatttaagttcttcccgtcccagtcatatgccactacaatagcttttccataatatccgcgggcagttacaagacttggatgtactccgtcaagataagctgtgcatgccaaaaatctgtctactctgtttgttttatcactggtctttccccaagtagtggtatctcctcttcccggatcataatcaaccgtctgcattgccgctccggtctgaccgttaaagattgtcagatattcaggtccgtcaatgataaatccgcttgagttaacataagacgccgaattatcagcgctttttattgcctctgtagttcctgcctgtgttacataattacctgctccgtctatggttccgggcgctgtttttactgccaattcagcttttccgtcaccgtcataatcataaacctggaattgagtatagtgagctcctgctctgatattagctcccatatcaattctccaaagctgggttccatccatttcatagcaatccaaatatactctgccggtctttcccgactgagaattatcttttgaattattggggtcccatttaagaattatttcatactcgccgtcaccgtcaacatcgccgacggacacatcgttcgcccctcctataggactgtttgactttccgctgtcatatactatctcataatcacttgccggtgacggaatattcagcggtatatcaaaatatgtatacggaacggattcctgtcccttatctgcatgacctgccaatatggttataggttcacatttctcgccttcctgtccgttaattacaggcgctattgtatacttatccgtctctgaaccttcaagatcagtgtaattggtattgttaatggaatctaccaatttttgctcgtttttataaatgttaaaaacagtgtccatgggctcgcttcctaatagcctccagctcaaataaactccgcctgacggtgccgttgctccaaaagcacctctgcccaatttctccatctgccttggctgctctgaactctgctgtaattcagaattcaattcaggaccatcctgaactgccattgcaggaatacatcctgccaacatcatgattgacagtataacgcaaaataactttttcttcataaaattaaccctccaatcgaaaagatatatacaaattataccactctttttataaattttcattataaaaagacggcataatttacagttattttgcttttttatttgactaaataaatttcaagtttcatatacagctattttatttgaaatattactgtttaataatattttttaagcttttaatagaagaacaaaatcacaaaataaatacaatgatgagacaggtaatatatattttttcaaatctgtttcataactatatttttgtaaatatataattaatctgcaaaagttccactgtactccaatacattatgaaatacatctatttcgttcgcaaaatcaaacttgccgcatttttacttttataaaatttttatttactttaatctgaaaagtaacaattatttacgctataataaaattgttttccctaaaattatatataaaaaatccggaacaattttgtcccggaatatattatatttagctaatctaccaaaataggtgcgttgtcttccttccagggaagtccaaacttatttaaatcctccataaatgggtcgggatccatttcttcaacattataaactccaggctttttccactttccgctgagaaccattgcagcgccaatcattgcaggaactccagtagtatatgacaccgcctgggagccgacttctttatagcattcctgatggtcgcaaacgttataaagataatatgtcttttcctccccgtcctttttcccggtgaatatacatccaatattagttttacccacagttctaggtcccaatgaagccggatcaggaagcacagcttttaaaaactgcagcggtataattttacggccctcataaattatcggttctattgacgtcattccaacgttctccaaacattttaaatgcgtgagataactctctccgaatgtcataaaaaacctgatacgttttataccttttatattaagccctaaagattcaagttcctcatgatgaagcagatacatatctttaacgcctacttcgtcaaaattatactcccgttttatttccataggctttgtctctatccatttgccatcctgccaatagcttccgtttgccgaaacctcacgaatatttatctccggattgaagttggttgcaaacggatacccatggtcgccgccattgcagtcgagtatatcaatataatttatttcatcgaatatatgtttttgagcatacgcacagaacacaccggtcacaccagggtcaaaaccgcttcccaaaatggctgttattccagctttctcaaacttttcacgataagcccactgccatttatattcaaacttggcagtatcgggcggttcatagtttgcagtatccaaataatccactttcatctcaagacacgcgtccattatagtcaaatcctggtacggcagcgcgacgtttattactatttcaggcttatataaattaattaactttataagctcgtctacgctgtcagcgtcaaccttagcagtttctatattagtgccgctcccgacttttttcttatactcttcacagcgttctttcaggctgtcacacttctccttcgttctgctcgctatcataatatctgaaaagacttcaaaattttcacagcacttatgtgccaccacaccggccactccaccggctccaattatcaatgctctgctcattttatcctcctaaaaacatattctatcttccgctcaacgctaaaagtaattctcgcaatattttgcacgcaattgctgtactggcaccgctttggtcataatgcggacaaagctccaccacgtcagctgctattatattcagaccgccgcacactttaatcaccgcgtcctgaagttccttataacttatgccgcccggttccggcgtaccggttcccggaaataccgaagggtctaatacatctaaatccacagtgaaatagacaggcaagtttgcttcttttaactcacatattaagtcgtcaagaccatttaaatcaaacttatttatagtattatgtttttttgcccactcaaactcatacttctctccgcttcgtataccaaactgccatatctttttatcgcctaagagttctgaacatctacgtatcaccgtagcatgactgagttccactccgaacatttcatctcttaaatcagtatgtgcgtcaaagtgtattattcttaaatcatcgccgtatttatcataacaagcccttaccccgccaagcgtgactaaatgttctccgccaatcatcacaggggttttgttttctttaatgatctcagcagcaaaatcttcaattattgataacacctgctcagtatctcccagcggaagttctaaatcgccgcagtcaaatatttttgtatcggttaaatccctgtcctgataagggctgtaggtctcaagaccccaagaatcggctcgcatggtctgaggtgcaaaacgcgttcccggtctgaatgatgtcgttgaatcaaacggcgctccgaaaacacatatccttgactcctcatactcagcgtcacagcctaaaaaaaacggcagatttgatataatagtattatcaggcattctcaagcaactcctttacataattcggaagggcaaaactgcccttatgcaggtcagtattataatattccgtctttatccccaatttattccatttgtcagcgtccaaatccttaagcgggtcaaacttattagacgcaaacccaaacagccagtgacctgacgggtaggtcggaatatgagcctggtatagcttatggattgggaaaaccccttttattctgctgtgagcccgaactaaagagttagcataattatcataatatgggctttcgtgctggtttacaaatattccattctcattaagagcttttgaacagtttccgtaaaactctcttgtgaacagaccttcaccgggaccaaacgggtctgtggaatccactattattaaatcatattcattcctttttgacctgataaattttaaaccgtcctcataatacaccgtaacgcgtttgtcttcaaaccccactctcattccggggaaaaacctcatcgaaacttcaacaactgccctgtctatctctaccaaatcaatattttctattccttcataccgcaccagctgttttacagtgcctccgtctccgccgcctatcactaaaacattttttatttcaggattaacagacatcggcacatgggttatcatctcgtgataaataaactcgtctttttcagccaccatcattaagccgtcaagcgttaaaaatgttccaaactcctttgaggtcataacatctattctctgataatcagtttttccggtatataattgtttgtctacccttattgaaaattttacatcttcgctatgattctcagaataccacagttccatcttttcaccccttttatcaactgctaaataacatttatataatctatatttatatcctcggcgccggtcataaaacagcccttttctttagcataggcaatataatcaagtatatcgggcgttatcatttcaccgggagccagtattgggattcccggaggataacacataacaaactcactgcataccatcccggcactcttctctataggaacagattttttatccgaataaaaagctttttttggcgtcattatcacttcaggtgaaatatactcatggtcgaacattccggcacttggctttctatgtatcctctctatctcactcagtgacgaaataagacgctcaatcatcaaaggagtatctccgactgaaataatcgcaagtatattccctatatcgccaaactctatttgaatatcataataatccctcagcatgtcatatacttcgatacccgcaagccctatatccctggtgtgtatagaaagcttggccaagtcaaaatcatatattgcgtctccatccaccagatccctgccaaacgcataatatccacctattttgtttacctctcccctggcataatcggcaagttccaaaacctttcggtatatttcctttccgttcaaagctagattctttcttgaaaggtcaagagacgacatcaagagatatgaaccgctcgttgtttgggtcaggtttataatctgtcttgtatacccctcgctcacatagttatttataagcaaaaatgagctttgagtgagagaaccaccgtttttgtgcatacttacggaagccatatcagctccggcttccatagcactgacaggcagattatcaccaaaataaaagtgagttccatgagcctcgtcaacaagaaccagcataccggctctgtgcgctatttccactaccttttttaaatcactgcatattccgtaatatgtgggattattcacaaaaactgcttttgcgtcaggattgttttctatagctttttcaacttcttttacactcattcctaaaggtatccccagagctttgttcactccgggatttacataaaccggtatggcaccgttcacgaccaaagcattaatagcgcttctgtgaacatttcttggaagtattattttttctccttcttttactgccgcaaataccattgcctgaacagcgcttgttgtgccgtttaccataaagaaagcgtgttttgcgccgaacgcttcggcggcaagttcctccgcctcgcgtataacagacaccggatgacaaaggttatccagcggcttcatagaattaacatctacgtccatacactgctgacccaaaaatgaggtcagctcaggatttcctttgcctcgcttatgtcccggaacatcaaaaggcacaacacgcattgatttaaatctttttaacgcctcataaataggggctttgctttgctccaaaccatcagtccccctaatatatattctttccgctgaaaatctcaatcatctcacgtctgagactgttgctgatgtcaagtctaaccttaggctctaactcatatacatcagttttaaacagataattctgcaaatctatatctttaatcagcattcttgtgtgaaaaatattcgactggtaaacatttacgtctatagcgtcatatttctccagtgtttttctgtctataaagtcctgtatcgaagtaatatcatggtcaataaacagcttttttccatccaggtcgcgcgtaaatcccctgactctataatcagccgttatgatatctgaatcaaaactgcctattaaataatccaaagctttaagcggagatattttaccgcaggtagaaacgcatatatccactcgaaaagttgaaatagcattatcaggatgatattcaggataagtatgaactgttacatggctcttatccaaatgcagcataacctcatcagccgtaatatggctgacaggaggctgtgaaggaatcatagactcatcgcttatcataagattgacgctggctccctgagggtcataatcctgctttgatatactaagaacgttcgctccaataatatctgtgacatcgcatagaatttttgtcagacgctcagaattgtactgttcgtcaatatacgcaatataatccttttgttcgcgctcactcttggcatagcacacatcatatatattaaaactcaaagtttttgtcagattgttgaatgcataaagcttaattttatcctgcatatgtcacatctccttgcacattttaggaattttatcaaggaaacaattatactatataatagaaagtatttcaatacatttaaggcaaaatatttttattttatgaaaggaacttttaaatgactattactgttttactttttcttgttggcctgtttttaataataaagggcggagatgtatttgtggacagagccgtttggattgcagaagtatttaacataccaaagtttataatcggcgcgacaattgtaagtatagccaccacattacctgaaattttggtttccaccattgcaacgttttcaggcaacaactcaatagctatgggcaacgccgtcgggtctgtgaccgccaatacagcaatgattatggctataagcataatatttctaagttcaacaatagaaaccaaaaattttaaattcggtatgatatgtctcatatcttcagcattcatccttatgatgatatgtaaaaacggtacggtatctgcgctcggaagccttctcgcttttggagtggttattatatttacttggaacaacctttcatcatcaaaacagaacacagttcttaaaaccagcaacggaaatgtaatccttccggcgatacctataataaaaccgactaaaaagcaggtttttataaattcatcattatttgtgctaagcgctgcagccattacagtaggagccaaactcttggtagaatcaggcacagatatagcaaaagcattaggtgtatccgaaagggttatcgggctgacaattatcgccatcggcacctctctccctgaacttgttacgactattaccgccattgctaaaaaacacagcagtctgtcaataggtaacataataggagctaatataatagacctttcattaataataccaatatgctcatttatatcaacaggaaagttcggcgtacctctgacctttgaaccgcagtatgaaatgcttgatattccaatctgtcttggatttatccttattgcgtgcctgccgccgctgcttaaaaagaaattttacaaatttcagggggtcgctttgctagtattatatttcctatacataggtttttcggtactttaaaaaataaaaatattgactcactcagtagatttccgctttttatcataaaaatatgcacctccaaaagcgtataacttttagaggtgcatattatatctaattcttatcttatatattttttattttttctaagcgcaaaatatactactatataaagcaaaaaataatgcttgcttttcataagcttaaacattgtagaatcagacttataatctttatccggcatctcttttacacatcttacagaaatttctttaaatcttttataccgctccttaaagcttaactcccattttgggttaaagagaagcatcatgctttttgttgtgctctggataaagcctgaacaaatatcattcaatacctgacgattctcaggattccagctatatatgtatttcattctgaatccgttcaaactactgactatttcaaaataatcaatcgggaatttattaaatgcctgccgcatatcattgggataatgaatataaaatatctcatctattaaggctatcttttcagccgaattcacataacgcattacaaatacttcatcctggttccgtcttaaagccgggaactcaacattattcgacttaattatatccaggctgaaaatcttattccacggcgcaccctgaacttcccatcttcgtttatcgcctgtgaatatgtcataattctgtctcacataactcccggtaaaaacttcgtttggataatcattgaactttctttcagtcccatcgctgaatatcattttataaccaaacactatcatatcgcaggaatatttttcaaacttttctatgagcgactcaattgcgttcggcaccatacaatcgtcagcatccgggaaataagcgtattttcctgctgcattttttattccggtattacgagccggacccgacccctgattgtcctgatgaaaaacctttattctgttatctttaaccgccagttctctgcacacttccagactattatcctttgaaccgtcatccacaagaataagttcaatattttgataagtttgattaagtaccgacggaaccgactttcttaaatgttctcccatattatatacaggcataattatgcttacgagaggtttttgcataacattcatcccccaatgttttattttgcgttgttttttatttcactcattacctttaaatcctcaataatgcaaagcctgattatttttttatcaactaaatatttatactttctaaaatcaggctcaaactctctgcagggaagttcattattaaaaacttccacaacgttttttaccgctttatatcttttaaacactttatatcttggaatagcgagaaacagcatttgaatatatatatcaaagtttaccgccaaatttctgcatattttctccaaaacttttttattgtctctattccaattataaactacattcatctgtaaatttttaaaagctgcaacgctttcaatataattctttaaatacttttctccctttttaactatcccagacatataataataataaagcacgtcctcaataaaacataccgaaccggcatttgacagaaacaaaatattaaacgcttcatcttcgctcttactgattttaggaacagataatttattattctttataatctcagccctatacagcttgttcgccatactgccatatataccatattcactgtcacggtcaataaactcatcataattttcacgaatatatttaccgctgaaatatttaggcttatacgattttctcattatacattcatcttgaccgttcacccattcatatccgcaaaccgccatatcagccccagtattctcaatagcagaaacaagcttttccacggcgttttccttgattctatcatcagcgtccggaaagtagtaatacttaccggacgcatgtgacattcctgtgtttctcgctccggctgctccttggttttcttgatgataaactcttattctagtatctgcagctgccaattgctgcataactcttaaactgtcatcagcagaaccgtcgtcaatcataattatttctaaatttttataagtttgatttataaaagtcttggcggaagtatataatacttccgccatgttataaaccggcactataatactaaccaattgttcttccataaccagtttccctatactaataccagcataaatctacaacgcaaagctccggtttattattgattctcggaataatatgcgagcttccaagccctctgctgataatcacattactgtttcctatttgatgaaaaccatcaacaagcttggggaagaatccctgtcccgtcgcataaagtccgccaacaaacggaattcgcacctgaccaccgtgagcatgaccgcaaagagccaaatctataggataatcttctaaaattcccataaactcatcgggatagtgaaccagtaaaagtttaaagtaatcttcctcaatatacttatcaaaaaattgatgaccatatctctcaaactgctccggtccctgagaaagtccgcctatgttcaattttgtatcctttatgtcaactatttcagacgcgtcgtctaaaacatgtactccaacagccttaaggtctttggttatattagaatctttaaataatttagcctcgtactcattatttcccaaagcatagtaaacaggtgcaatattcacgagcttttcacaaagatttgtcacaacgctgtaatcgtcatttttcagattgttcatatcacccacacatgctataatatcaggagtcaacttatcaatctgttccaccagccttatattatccttaccaaactctttaaggtgcaaatctgcaagcacgactatgcggatattgtccgaaaccttatctgaacgcacctgataaaatgttacatctatttcagattggttcagtaaattaaacgcacagactgcgagaacaattatcaatattaccgcaataatacgccacttatattttgaaaacaattcaaagtatttcttcatagacttatctctccaatataacggtctctgattttattattttttcttttttggagcatacatatcaagattcaagctctttggctcctcagactttttgctccgatatgattttttcactctcagcttaggcgcataaggattattatcatcaattttcgatatgacgcttgaatctttaatattatccgtacttttttttacaagaaccttaacttcttcgatattttctgaggtatcagaaaccatatcgtgttcaactttagtattcaatttcgcctgaatatctttttttggttcatctacgcttttaatattatcaggttttgacataacagattctttagaattagagacgtaatctttattaacattagacaccgtttctgttacagccttatatttcacattcgacttatcattcttagaatccgtccactcaatagaaggatagctatccgaaatattttttgagttatatttgatgccggaggaacgtccgggaatagtttcttttttctcagacacacgttccgcccttattcctgccataacagcatccgttaccagcttaactatctcctcattatacactcctctgctattctgttctgcccctgtataaatatcgcttttgacatcttggctgacagttttagtatgcttaacaacacttttttttgaaccactgtgatttttatttttgctgtgtttttgtgaatttttacttatcgttgtatcgcctgcacatgtgctgttgtcattaggtccgtttttgggagacttattctttggatttactccgcctccgggtccatcatcgtctccgccgtcatctctgtcttcataattttctgctctttcacttttaatatttgtatttgcatttatatcgcggaacgatgcgcttattaaacctcttgcgtcatatatacccttatttcttgtttcttcaatagcataagaaaatgctatatcctgttttggattttgggaattataatgctcaacataactcgtcagaacatcaataaacatttcggcctttttataactgcaattttcaaacatacacataaactggtcgcttccattatagcctacaaaaccgtagtcctcagcagtctcacgcaaaatctgtccaaactctccaagcagagtatcgcctgctgttcttcctatttgactgtttactgccttcaaaacatcaaggcggataagtataaaggtaaagttatcaggcaacggtttttcttcatactgatttatcagcatatcacactttgcacgattcggcagcttagtctttctgtccatatacataagatattcaataaagtcctgcatacgaccgagcaaaatagcgccgagacagccgcaaattaagaacaacacaacagctatcattaaataaagcttaatatttattctctcgttcacattaatactggtgagagaagtaatatttgacgcgcctagatattgattgaattcatctactgtcttttcaacaatttcataattcttatccagactgtcaataagttctttcatattgttttgtatctcttttattgcctcgtcagcatttgaagccggctcagccgtttcaaagatatttaaaagttcttctctgtgttctttatcaacctgcgtatactggcggtcaatttcaagagaaacatactgatttataagtgcgtcatatgtagtttcagtattaatctgatgtttgtattcatcttcatatacatcctttaatatataatcgcttgtattatcagaatcagtaccctttccatagtggtactgtataccctccttacttttttgactgtactgagttataagagcataaagcgggtctattttttctgaaaggttagctaaatcaatctgatactggcttattcggtttctataatctttaatcaaaactgattggtccttagacactttttgatttaaaatcttagagtacaactcaggaatattatagttcagctcctctttatacatattatagaggtcgttaaatgaatatcctgtagccgcagacctaaaagccggataatgaaactttttgtcatacaaataattataaatatcagtagcagaggtatccaagatttctgcgctctcaatataatcataactgccgctttcaatatttgaagcattattcggcaaaactgtctgatttatatatttttctccgtaattaataaaataattttttaaaatagaatcaagaacgcttgcagcataccctttgctgtaatcacttccaacgctgaacgtaactaagtaatcagtcggatgatacacatattcttctccgtcttttagtatcgcttcttttcttgactcttcatctgccggaataattggctctacagcgcacttagaacgaatagaatcagctccggtatttaaatccaaatcctcaagaacactggttattacctttgacgaataaatctcactgacatccaaactatctccgctgggagtcaaaccattgcttgcctctgaattagaatatcttaaaacagtctgcgccgtatacgtctgttttgacatagcatactgataaacgagaacggcgcccaagatacaaacaatcacaatcaaatatttccatttttttatatatcttaaaatttcaaagtttctcatacgtgcgccctcctatttctaagctttcttttgctcataaaatagaacaaagcacaaattaaaacaaaaaatacagcgcccaaagctattacctttttaagtgataacttctgaactaaagatagctctacatttttaaatgttaaataatccttagttttatatttaatatattccctgtctgtggcaagtgcaatctcagaaatatttttaaactcattatttatatttttgagcatttcctcagccttttcataatccccaacagccggagttctctcacttaacttatttattatatctgtatttatctcaatttcttttaacgtgtcctttgccgctgacaaatgaaattcagcgtcttttgccagataatcaatacctatattggttctggacatataatattcgtttttctcattgacagccggtatcataacagttcctatcatagcttcatcgtattttgatatgccgtcctgacgcacactgtaatccgccatagatttttgatactgcatatcaagaacagaatttttataatacaaagtctgaataaactgctccttttccttagcaagacctgtttcaagaacaaacgatttatattttgaaatgtcatattccagcaagttttgtaccattctctttaccgtctggaacgtctgtcccgtctctacagatttatatgtaccattttctgaaactcttccggacaaatactcatccatttgatttgctaatattgtaagctcatcgcctatttcaacatattccatatcggttatatcatccatattataagtaagcgcagtctttttatcggcataattctcgtgaaatacatcattataagctttgcaaatcatggtcataatatctttagcagaatatttttttgcttctttatttttggtatacgaaacattaaaacttgttgagataaaataattgctctcctcggtattaatagcttttgaatttgcgttccctacagaaatatgctctgaaagctgctcaggagttatatctcctgtgagtcccaaatattgtatcgcacgttctaaaaccgcatttgattttagctcatacatattaaatcttgttgaatttggattaagacctttagaaccctcctcataattcaaagacattgtagtatttacggtgtttccgctttgatatgcaaaaaagacacacaaaatcagcataaatgctattgtagaaaaaataattttaaacttctttttccataacaaaaacacaatagtttttgtcgatgaaagtccaagtttagcagggtctttttctgcaactacagctgtgttttccatatattcttttttattcaaaacagatttttttatattcatatttttgaattttccaaaatcttctttaatatattcctttaacttttcaaaaattatcaataaaatcacccaacttagtaataatgacaagactttcgtcttaccgcagtttatggtttagctttttcttatataaagttacactttcttctccgcgctttgataaaatctcaaattcactcttttccccatcatttaaaacaacaagctttcttttaagcttcccttttcccaaactgttctcatttccaatgtgaagagcataacacattggaatcagccgcaaaacggttcctgtatagaaataaaataatgtattgtcagtcatataagtcaaaaagatatataattcacaaagaaaaaataatcttaccgtttccagtccaaactttgattttatccaattatattgaaaaatcagagtataccatccccaggcaaaaaatccccaaaatcccatttcaatatacacacgcataaaatcattatgcaagtcaatcatgccgttaaaggctttaccgccttcctgcctgatttctgccatcatcatatggacatactcaaagccgtgaccaatataagtcggagaaatcttataatatttgtcaacagctccatataaaacatttctgcccattacatccacaccgagtttatccattatcatcataaaaatattatattttatgctgaataaatataaaaatgaaaaaatcactccgcatataagtatagttttcattataccaaactgcacacggggagtaagcttttcaagcccccatgcagccagcagcattaaaatacaactagctatagcgattctcttaaatccaagaccgaacaaaaacaaagccaaaattatatttatgactttcatcttctttgaacttatcttatcaaagaaaataaagtaaatcagaaaaaatccataagtaaacgttacatcatgaatttctaaccctttcatatatccttccgcagttccgccctgggttagaaaaacggttacagatgatactatttctgaaatcggataccgcggaaccaaaaccaaagctatagcaagattgcccagtgccagcccccagaacatatagtgtatgcctttttcaccaaacaaatatgctgcggcaaatatattaagtatcattataaactgaaatactatttttgaacagcccctcatcatatatgacactgtttcaaaattaagtatccatattataaaggaatagacaagcacaacagtaagccatattccatacacaaccataaatccggatatattgccgagattattaaaatctgccgtaataaatattacagccgctgcaagaataactgtaaccagcgttattgcttttgcattactgcttccaaatcccgaatcaagaacaaccgccaaagcgaaacagacaatataaaacgccgcaagaattttagaattttgcctgttctgcaaattagacataaacattattctccttgtctgttgattcgagccggccaaactttctacaaagacaatattgcattaaagttacgttcacagttgttatcgtctctaatctcaaaaaatgtttcggctctcgctttatacatatcatcaactaaaaatccgtcgttcaccttttctgctaaataatttataacctcatcttcggtcttcaaaaccggaccaaaaccatcccggccatagtcaaaataaccatgtgcataatgaatatcatcaaattgataataaactattggttttcccatatatgcaaaatcaaaaaatacacttgaaaaatcagtaatcagcatttttgaattcataagcaattcctgtacatcatagtcgttaaacgaagcgattatgactctcggactcacagaatgaaaatcttttaaaaatctttgtatttcaaaatgaggataaaaaacaagttcaaggtcgtttttgtcaagataatcaattaaattctgattattaataaaactttggagttttctataatactcagattgagtaaacttatcacggttccccaccgcacacacgtcgatacgccaagtaggcattaataatattctattttttagaacacacggtttatttaaagcgtcatatctgcacaatccgagatatttcacgacaccgctgggatatccatatcttttaataaccgcttcatattcaggacgtgctccgcaaacaaataaatcaagtttagttttcggataaaacatccactcaatatcattaactattataccatgctgaagaaataccagctttcccttgatgagacccaatttctgaaaacggttgtaactcaacacatcaggtgaatatccaaaaatgtgactgcttattttatagtcagaaacggcaaagagaaaatgatgttttaaacttttatatttgacgatattaccaagtttagcaactttatggtagtccgccgattttttttcaattatataatatgctttaatttcaggatgattttctcttatatatttaaaaaaatggtacccattatctctggcgtctgagccgcgctcagaaactatccaaacaccacggtatttggggaataagacttttgctattctccctattggataaaatataaccaaacagaaaaggtaccatatatacttaggcgcgcgaataatcaatcttttaaaatgactcattaactaccacctgtcgtttctgcttccgccgtattatttattctttaaataccaaatcattgatatttattttaaatattataccactatttaggcgttattgcaagcgtcttaaacaatattctccgaatatataacaaaaaacgttcccttttcaaaagttttcagttttatattattcgttgaataactttccggttatgttgacaattggaaatttattttgtaaaataaaaagagtttgatatcataaggagaaataatatgaaaaagaatatagtgcttgccgattgtgtaactgacgaagtagcctccctgctcaacggtcttaacaaggaaactgacctcaattttgaatgtaaatccataattgcaaactgggggagcagaggaatttttaatgttatcaaacgttatttaatgtatttttatataacctttttgtattttcttaaacgtgaccaatatgattatattttaggctggcagcaattttacgctttggtattctgcttttggtgcagaatttttaggactaaaaagaaaaataaagttgttgttataaattttacatataaacaaaaatcaggattttcaggacgaatatataaatggtttatgaaaacctgtctcagcggagactatattaattttatacacgttccgtcacaaaactacgcaaatcaatgcagccgggattttaatataccgctcagcaagtttattgttactactttcggaataaacgatatgtacggtcaatggaaagattcggaaaaacctgaaaagataaaatcaacagattatgtgttggcaattggacggtcaaacagggattataactttcttttggattcctggcagggtattaacgaaactcttgttataatatcagacacgtttaaacctaaaattttgcccgataatgttttgttaatagatgatataaccggagacgggcaatatccatttataataaactctaaagccgtgattcttccaatagacgacggcagaatatgttcgggagatacagttttactgacatccatgtcatttaaaaaaataataattgttacaaagccaagcactttgagtgaaatgtatattaaagacggtgaaaacggtctgcttataacaaaagataaatcaagcgtacataaagttatctctgatattttttatactgacaaatataattatatcggagaaaatgcaaggaattcatttttaacaaacttttcaagagaaaaaatgggccgagttattggccaagctataataggataaattaaaagcgcggataattccgcgcttatttcagttattttacttttttataatttcggaatatatttcttctatctgcctgccatactcgtcaagagttgtcatttgagttcttttttcctcacaaaatttactcattttttcacataattctctgtcattataaagcgtgcttattgcttcagtcaaagctttggaactaacctcttcaagaattattcccgttcttccgttttctacaagttcaggcattcctccgagaggcgtgcagataaccggggttccaaaagattctgattccaaaatcgaaagcggacaattttcataccatattgaaggataaattgaaaacagcgcttccgctatcaatttatgcagttcttttccggttttgaaccccacaaattccacattaggaatccctttacaaacattctccataggtccaacccctgcaactttaaacataatattgggaagggacttgcaggcttcaataaatatatcaactcccttctcttcagataatctgccaaaaaataaaatgtaattcttttttgtgtgttcaaaatcaaattttggaagttctatgtagttatgtattgaaactgtttttcctttatatatatattcgccaagccttttcttttcaagaagtttgctttctaaaaacctgctaggacatatatatttatcaacttttttatacgtccccttaatagcgtaaagccacgcttcaactgcaccgattatgcttttaatccttgaatagtgtatacactttcctttaatacaatttatctttgagccgttaaggcatttttcacagggggtctttttatataggtcaaacataagatgattaggacaaagcatttgtaagtcatgtacggtttgaacaattggagttccatgcttttttatctcatcaataattgaaggggtaagctgataattgatattattcatatgaacaatatcaggctgaaaattttcaagcacttttctgagcttttttcttgcctgaaatgaatatattattctaaacggataaagaaacttttccgctccgctgtcatgaaagtccatattttgtgtgtattgctctgcggaattatgcaccacattattcttatcgtacataccaaaatactcaacttcatgaccggctccgctcaaatattcacccagctttaaagtatatgtctctgcaccgcctttcggatacagatacttatttattaataatattttcattcgccgcacctcgctataccaccaaattattttccttttttataaagcgctgtcgtttgatctacaattttttcccaatcatatttttttaagatagtttcaaaattttcttttttccatatatcagaatattcgccttttaaaattttatccagcttaaccgacaagtcctgaatatctccatgcttaaatgaaggcatatacccgcctacaacttccacattctcaggtatatcactgacaaggcacggaacgccatagctcaccgattccagcaagctcattgccaacccctctatatcgcttggaagaacataaatataacaattcgagaacaactcatcgagcaatcttccttgaacaaagccggtcaaaattattctctcatcctcagacgccatcttcttaattttttccacatactcattacccggagttaaatctccggcaattaccaacttcttatttgtctcaacagttttaaaagcctcaattaaataatgcaaacctttttcaggcacaattctagctaaaaacaaaatataaccgtctttttggagaccaaatctttcacttatttcccgagcagaataatccgcatttttcttgacaatgccattaggaatcaagtgtgtatcccgtccataagtttctttaaaatacttttggttattatttgacaatactattaattcgtcagcatattttgaagcacatttttctccaagcttcagatattttgttgagaagccgccccatttggcacgctgccagtcaagcccatgtatagtggcaaccgtatgtataccaaaaagcttaggaagccacatcatagcgcacggtccttcagcatggtaatgaatacagtcataacctccaaacagcgcacgaaaacttgccagcactgaataaacaaaggcgtttaaagcgctaaccttaaaagttgggatttgaattatcctgatacctttatattcccgaggctgtttatacgctttgccaaatctgtctttgcgattatatacgtcaacttttaaacccctttcaaccattcgtaccgacagctcttctaccacaacttcaataccgccttcacgcgatggaactcttttatgtccaatcatagcgactttaaatctttttttatctttccgcatcatagcaacacctttcaatattatgccttgccaaacggcctttttttatataaccggctaataacaggcgtcagtgcggtatacattttggtaacaaacttccacataagttcctttaaatacacgtattcctctgttctgcaaaagaagacataattcatacacaatggaacgaatatggataccgccgcctttaaaacaaaatctatgtataaactgccgacagcaatttctgcgcttataaacttcgctaaaagcataataacaatacctattccagagtaaaatataaatctaaaataatactttccggaattgattttaaagcgttcagtataaagcagacgtatttttaaaataatttgtattaccagagacgccaaagttcccaaaagaattcctaaagttccaaactttattccaagaataatagaaagaattagattgacaacactgcctgctatagaaatatttttatccttggcaaacaaaccggatacggacataaacctccaaagaggatttcttaacacggttaagaaaaagtttacacacaaacaaaatactaccatcagaccaatcatagaatctgcattatacgtatattccaatccgtacattatcctgacaagcgttgacgaaagacaataaagacagcttgcaaacaaagaaccaaaaaaataattaataaatgttaactttctaagcacctggtcacacttatcacggtcatcctcagccatcagattgcctacgcttccagccgtcgcggcgtcaacctggtcaataagttttctcagtcccatggccaatgtcgaatatcctgtataaataccgacctcataagtgcttaccaggatagaaatcaaaatgttatcagtcgaattagttattttacctgaaagacttccaataaaaatattctttacatttttaaataccattcgcttttcgacgttcagaagttcgtctttcctgattaaaaacggatacatcttatctacctgacctgaaataactatgttggtggcaagggtaagcaatatttccacaatcagatataaaatataattatgaaaaacaaataaaagaattatgttaataatctcagcaacaattttaacaatagtagtaacctttgaaactatatataccttttgatccgcattaagcaaggaactcttatatgagaataaataagaagacgctgtctgagttagaaataacacaaaaacaagccgaatatatccgtcagacacatcgacctttgtaacaatattctgaataaacggaaccaggcagagacctattccaaacacagccaaagctatattacggtaggctgttttatacatattcatcagctttacaatcttcttttcgtccctttcggcaagaggtttgtaaagactgtaaactatagccgaaccaacacccatttcggcaagtgacagtattgcaattacctctgtgaataaaccgtttaagctgactgacagaattccaatctgacgcaccagaacgattctcacaataaatgtaaatgcaacgctgacaaactgagaaatgacgccatataacaagtttttagcgcttttctcacttcttgtaatatccgtcctactcttcatatattcactctttctaccaatatgttaaaacgttagttaccgttcataaaactatttacaatatgagtataattaacttgaataaaacttatctctaagtatataatactcaactatttacaagtttaccgacaaatccatctgattcaccggaattttcattggaatagtgcatatatatactaatattccggcttaccggacttccgtttttatcccgaacttttatcctgcaatttaaaaccggattattaatattaagcttattcacactattcattaacttttctttctcctccggggtcattgaaggatcctcatagaaaaatttctgcgcattagtaatcaaccttgcttttccaaactctttagcataggtttccgagaattcaattatatcattctttttattgtatttaaaaatcacatcatcatctaaaactgtaaaactgtcttctttatcagcattatcatttttacatgttttatcaaaattttcagagttttcaagttcaagctttgaactcacttttttcctctcatattgtggaatttctaaatttactttgttttcaaaggccattttatctaaaatatcttttagctccatatgacaattttttaagcactcaataatatcaggattaaactttccgcattccccgtttaatatcatatcaaccgccttttcatgtgaatacggaggtttatataccctcttgctcgtaagtgcgtcataaacatcggcaacagaaactatctgagcggatataggtatcatgtctccaacaagtccgtccggatatccgcggccgtcccagcgttcatgatggctcctgcaaatatcataataatacttgtacataggactgcattttatcatatctatactgtccagtattttacagccgttgaccgtgtgttctttcattatttcaaactcttccgcagttagcttcccgggcttatttaatatatagtcaggcacggaaattttgccaacatcatgcattgtggatgccgccgaaatattttcaatctcctcatgagcataccacttatttcctacctgcttctccaactcaattaaaagagtttttgttatctgccttattctgcatacgtgttcacccgactctgagtcacggaactcaatcgccgtagataaagcgtcaataatagacgcatttgcttctttaagctcctgagattttctttctatttcttcagtctgctcttttacacgcttttccaagtttatacgataatcataaagttctattgagttttgtatacggcacttaataacataagggttaaacggcttttctattctgtcgactatgccattctcaaaccctctgactaaggtttcattactagtgtccgctgtaacaaaaaatataggaacagatggtatcagctcctctttttttatttgttccaacgtctcaagaccatccattacgggcatgacaatatcaagaagcacagcggataaatcaggattattcctaatcgtttccaacgcctcttccccattctcagcctccagcacattgtagctatcagcaaaaagttcactgagaataatcctattcatctctacgtcatcaacaaccaaaacttttaattttccaggcacagccgcacctcctcccagctatattaaacactacagctgttttgccaactcacaaacttttttctgttcaatcttaagtttttcaaaatcttcatccaaactatcataaatattggctctaacattatccaccattctctgtccgattttctgaatctcactaaagcctagatttccggcaactccctttaaagtatgagcggctatctcaattccgctgtaattctgttcagccatagcagtttggagctcattaaaagtgttatcgtctatatacttcatagtacattttgctgccaaatccatattaccgacaaatcttgccgacacctcatccttatcaattcccagctcgtcccaaaattcgattatagtcatttatatttctcctctctgtctaatctctcctatatatatctcttgtataaaccttttcacttacatcttcaatctcattggaaaatctattggcaacaataatatccgaaagttctttaaatctatctaaattatttataactttcgctcccataaacgttttgcagtctcttaagacaggctcgtaaattattaaacttactcctgaactttctaaccttcgaataacgccctgaattgatgattgcctgaaattatcagaatcagttttcatcgttaatctgtatattccaacaacttttggttctctttcaagtatccttgcggcaataaaatcttttctggtcacattagcgtccacaactgctttcataatgctgttaggaacctcaccgaaattgctcaaaagctgtctggtatctttaggcaaacagtatcccccgtaaccaaaagacggattattataatggttacctattctgtcgtcaaggcaaattccttctataatttctgatgttttgagtcctttaatttccgcatacgaatcaagttcattaaaaaaagctatcctcatagccaaatatgtattggcgaaaagttttattgcctccgcctctgtcgaacctgtaaacaataccggaacatccttgttctctgccccctgctttaacaattcggcaaatatctccgccctttttgatttttctccaactattatacgtgaaggatgaagattatcatatagcgctttgccttctcttaaaaactcaggtgaaaaaatcagcctgtctgttttatatttttccctcatcatctctgtaaatccaacaggcaccgtagactttataaccattacagcagtatcagaatattttaaaacctgttctataacagtttcaacagacgatgtatcaaaataatccttctttgtatcataatctgtcggagtcgaaattattacatattcagctccgctaaatgctgtctccggaagatttacagcacataaatccaaatttttatttgcaagatattcgctgacgtccttatcaactataggcgatatttttttgtttatcatatcaactctatcagtatttatatcaaacgcagtcaccttgttatgctgtgaaagcaacacagcatttgaaagacctacatatccaatacccgcaacggtaatacgcataattccacatcccatttatttttctgatcaataagcaccatcaccattaaacactgccgggatagtctttaaaattatttttaagtcacaccaaataccttggtcatttatatattccagatccatatctatccatttttcaaaacttattttgcttcttcccccgcattgccaataacacgtaagacccggtcttaccttaagtctctgcatatcgtattcactatccatgactacctcacttggaagcggagggcgcggaccaactatactcatatcaccgattaaaatgtttataagctgaggaagttcatcaatactatactttctaataaaacgcccgactttagtaaccctcgggtcgttctctattttaaacacaggtccgctggcttcatttttactctgaagctcttttaacatctcttcagcattaacgaccatgcttctaaatttatacatccgaaaagctttgccgtctttaccaattctttgctgcataaaaaaacaggaccgccgtcttttttgattgcaatagaaaccgccaaaaataaaggtgataaaaaaataagagcaagcagtgaacaaataatatcagcagttctttttacaaacaaataccacaaatttttgttgggctgaatatttttaaatatttcataatgctcttttttaacaatattatgtgcagggttatactctcccctgtaaatctttcttgccattacgtttccccctaaaagttcgtggcttaccaattttatacaaatcccgtcccatataggtttataataacacaattctagaataaatacaagatttttcgtgatatattaataaaataattttatttaattaaaaaaatcaaacaatttttaccaatttatccattaatatgaaacactcaacttataataccgcttaatattatatgcagtaaacatttttttgacatcatattactgtaattttagataacaaaaagagccaaattgatatgccccccaaaagttagaccaaaaatctaacgattaggaggtcggttcaaatatggctctttttattttatttttttaaaaataattccaaaaacagaggaagtagatataggtccgaattcccggctgtcacggctgttgttcctattatcccccatcacaaagacatgatctttttcaacaacaataggagttccggcgccatattttccgtcttctatcaaggaagttatatactttcctccggttttagtcttttcgctaacatatggctcgtcaatcatttcattatttacataaatatctccggaattaaaatctatataaaccgtatctccttcaacagcgataattcttgagacaacagcattttttctgtcttcattagaataaaatgttattatatcgtttttctgatagttttgatttgttttattaatcagccagctttccccttcccgaattgccggttccatactggttcctgaaaccgtaacaactgatataacaaaagttttaatgaaaaacatggctaacataaccacaacaacggcgccaattataataaacgcccatttaaatgccggattatttttcttatttatatctttatgaacaccattacttgcggcaacagtattagcatcattaagtttcatattttcgcactccaaaattcaatattggattattgccgcccgccggcggctcattattgtagatataattataaaacaataagctgttgttgtcaatattactttagaatacataacctatactataacaatattaaataagcaaactatataatatattttaaatcattaggcaaaactctatcttttgccatcatttccatttgtacaatacattcgctcacagtggcaaatctctttctggctgcaaattcatcgactatctccaagtccttgtccagcatcagcgcttttattccatatggaagatatttattattatctatcgtcattgaatattctacagtcaccggtctgccatgaaattttgtctcataatgacattttagaaaaccctcaaacaaacattttatacaatcagttgaattataaatattaactttcttttttataatattaaacaacttattttgatctttcattataggttcttcaaacgcttcactttccattgttctctcactcactctccaaactatttctcatttgattttatattttgccgcaaatcagaataatacacttattttgttttataagcaaactttaaaatataatattttaaaaaattgcataactaccataaaaacgaaaactattaattatttcaaatttttatcagcaataattttgtaacattttaagctgagataaattaaatttcaacgatattaaactagttattccgttccgaacttaacgacgtgcaaaaataacataactgataatataataaaaaaaccttgtaatctaacaattttaaaatttatatattattattctatgcacggctaactaaaattagacgtaaaaagaggcagctgcgctgcctcaaataacttgaacaattaatcactcttcacagaagttttttcaccaaacggaaaaccacattccggacagaatttcggcaaactgcttagttctgagaattcccatccacaattgccgcatttataaaacggtctctttgctccgcattctatacaaaatttaccatggtttttggttccgcatttacatacccagccatcatcagacattttagaatcaactacaggtatttcaggctgcttattatcagaatcagcggtttgtctgttaggcatcattgtattcatcatattcatccccatcattccaaccacagcgccggttatatcaccgccattaacgccgccggactgttttcccatattttcgaacatagctgactgtgccgcagtcatacgcccctgaatagcaccttgagtgtttccaagcatcacggcagtgtcaaactcctcaattctagcgcgtgatttgtcatccggagtgattttttcaatccccaccgagataatctccatgccgcgcccctgtttccatgaggaatctaatatattactcataaaatcagataattccatttggtgcgaaggaatctcactgaacttcacaccttgaccggacagcttattaactgacgtatccaacgctgtcagaaattcacttctgcattgttctaaaagctgttcgctgttataagtgtcactgacgtttccggcaatgctgttataaaacactaacgggtcagtaattttaaatgtaaacataccataatagcgaatatataacaccgttttataatatgggtcatcataggccattggctgtgcagttccgtatttatttcctaatatctcttttgtgttaatatagtagatgcgctggtcgtttcctgtatcgcctccaaaagtaaacctcttgccaacttttcgaaacgattctcttagaccttcagaaaaattaccattcagcattgatggctctgatttactatcaaaagtataagctccagcttcacaggtaaaatcaattattttcccttgctctgtcacaatcattgcctgaccttcatttactaccagcaggctgtcttgagttattatatgttcactgcctttagtattgctggattgatagttggttgtgttaatgcgttttcgtcctaactgcagcagcgtctcttgagccatactgtcacaaacaaaatattctttccattgatcagcaagctctgaacgaaaagctcctgaaaaagctttaataagtcccattactatatctcctttttatagattttcaccaataaatttacaaagtacccaattaaaggttcctgatgtgacaattgacttgcaataaggacattccccagcggaggtgatttctgtaggcgctccgcaattagggcaattggtaacactcaaagattcagggtgctcagatgtttttgttccaattgtccgcataaaagtcaaagtatgaatcatttcccacaaatgtgttgtattgccggcaataatttttccggttgccgtttctttaacatagtctatcatatttgtaagcatttttacctctacatattcataactttgatcacgataaactttattgataaagctgtcttttacagcaacacgttccaaataattaacagtgccgttgcgggtatattcatccaattgctgagaatgctctctaaagagctgctcagactcaaacggtcttatcattttccaatcctgtttagtccaagcgacattcaaagttataaatacttcgcgggcccatgcaagaaatgcctcctcagaaaaattaggatccgtccgctgaatctcaaccgatgggtttacagatggtttaacatacccgcctctaggcgccgacggggcggcagtattgccggtattagcatcattgctattattttttataatcgatataatacatataattaataatattacaattccaattgatataaacgaaatgttgccaaaattgccgccataacctccataacgcatgtaaccgccgtaacctccgtaacctccactgtatccgccgtaatccgaggagccgctgtatcctcctccataaccgccagagccgctcgaataatcgttttggttgccaactcccgttggaacaagacgataactatagcttgtatttccctcatcaatatatgttgagacagcatatgccacggtgcagacacacattaatacaacaataagaagtatacaaactttatacacctgagaaattcgttttttcattatatttctcctttaaaactcgaaatatctaaataataaagcataatctgtttctcttaatacaatataacacagtgaattcatcttgtcaataatgcgcaaaaatcatatatactttttataatcattgtaaacatttaacattatattcttacaattttaagtaataaatcaagttatgggataataaaaagtatataaaatgtagttttgtaagcatcggtaggtgtggccacactcttcttaaaaaagtgtgttatacatgttatcttgttttgtcattgcctacaatgtctatgcccccacctgaaggatggggtaatacaaagaagtgacttgtttagattagcctgcaatgtaaataatatgaatgcgcaaataataacttgaatacgcaatacagatgaaatctgccgcgtaagacgcgcagccgtggtaaagtttttaattaaattggattctaaaaaacttttttatgtatattcacgctccgcgtgatatggcagttcacctaacgaggtgtgcacaagcaccccctaccgatattcactttaaatgccgtacattaagaaaataattctttaattatttattacaaatgttgtatgttaagaagtgaaggcgtgactccgcttgtaaaacgggtgtgatccatagagatttgggcagtccgcctacaccttaaccttcttccgtttccgttattaagttattaagcaacacgaataaaaaaccgtcagaactataaaagttctgacggtttacttattataatagctaatatcatataaattattctattataaatattttttattaaaacaaacgacaaaaactacaattcctgactaacagtaaatgaatttatatataagtcagctgaaacagtaccggcagtataaccgtttccggtttgacaaatcatgatatttgaaatcgctccctgtgcagcaaggtcagtaaacgcagagaccgtgtcactgtcatgactcgccaaaacattatccccttcggaaagtgttatcgttacattatttgtattataatcaaatacagatactaacttatattttttatcttttgtcagttttagtttatcatctttgtttccggcatttaaataaaattttgattttgtgcttccaaatttggtttggaaataagcaaaattctttccatttaccctattgaaattaatatcagccgcagagctctcatttatagcagtaaattcagttgttattgtgataactcctgtagtaatattgctcggagcctcccaagttacactattctgtcctgctgctgcgtctttcacttcaataactttttcaccattaacctcagctacagatatatcgccttctgctgcagttcctagcccggcctttaaaccggcaactgtctctccgttagctatattacctacaggtatatcagttaaatcaagtgtgaaatttattggttcaaccggtggattggtcggagcttctgttggagcttctgttgggcttaaagattcaggatatgttactgtaattgatctccaataattcccgcttggattgcctgcaactatatcgcatgttcctgccgccgtcactgtttcactttggtttgaaccggtctttgttactccattaatagtgtatgttccctcttctgagtaaatattgttaactgttacaacactattctcagctacaggaaccgtaaacttagttcctgtattaacctgtgcccaatctgtccagcttgcattagcaaactttccgtttgttgtatcaacagcgaacttcacatcaattttagctgaaccatttacagcttgatataccaaaaacttattaacaccctgccactgaactgtaggtgctccattttgtctctggaaatcgtatacaaccgttcctgacagagcttctgtgttttcagcaaatacaggtgttaatgtcacatcgtcctgtaccgtatactttgaaccaatatcaaaagtatctgttccgtcagtccagcctgtcaatgttttgccctcaagataaactgttctgttaacaggaatttcaacctctgtaccaaccgcttcttcaatggcgtccggtgcatctccttccgctcctgtatctcccaaactaaaggtaacagtcttatttgaagccggagttgcgctcggctcaggagttatacttggctcaggggataccgttgcgtcagggtcatctgttgctccaggtgttgctgtaggatttgtagattcaagatatgttacagtaacagatttccagtagcttccgcttggacttcctgcaactatatcacacgttcctgccgccagcattgtttcactctggtttgaacctgtctttgttactccattaatcgtgtatgttccctcttctgagtaaatactattaacggttacaacactattctcaactacaggaaccgtaaatttagttcctgtattaacctgtgcccaatctgtccaatttccattagcaaactttccgcttgtagtatcaactacgaatttcacatctattttgtcggatccgcttactgcttgatatactaagaaattactaacaccctgccactgaactgtaggtgttccgttctgtctctggaaatcatacacaaccgttcctgacagagacgctgtattatcaacaaatacaggtgttaatgtcacatcatcctgaaccgtatactttgaaccaacatcaacagttgttgttccgtcagtccaacctgttaatgtcttgccttcaagataaacagttctgtttacaggaatttcaacctctgcacctgccgccatttcaacagccgccggagcatcaccctctgcacccgtctctcctaaactaaatgtaaccgtcttatttaagttaggtgttgcggtaggttctgacgcatcttttgttgtaacagataagccatgaacatatattgaaccgctgtcaatagtaaatactaatgttttagcctcaccgctatagttaaactcaattgaatccccatcgttagcggtctttaatgaagccgaagcaggagccactccctcagtagaagctgtaattgttgctgaagcataagcacagcctttaaatacgattgcagagctgccttcagcaacaggaatctctactgtcattgcgcctgcgctctgctgaacgccatgctgagtatcatggaacttaacgcttctgaaagtaagcagtccgtcaggagctactaaggtatcaaatccaattgcagttgactgcggaactatgctgccgtccccaaagttgtatgttctgcttcccgctgccggttcagcaacaactgcaaccgcgtttatagttggcgcagcattatcagatgttattttcgtgtcagcaggaattgtatatgcgctgcttccgcctaaaataccggtaacatcaatactcttgcccgcttgaagagttgtagtaaactttccgtctttaatatctaaagcaaccagctcgccgcccatttttccaatgagtttaattccttcggcagaactgtcagcagctgtcaatcctgtaatcataccatttatttccatcaatggcttagccgttggtatttctgttgacggatacttaggtgaaacaattgaaacagaacgataaaatcctccaactttcaaaacaatatcaattgttttctctaaaccataataagtatacgacttattaccgcctgtaaatgtttcaccgtttattgtgtactgctcagttccataatatgtgtcgcccatagttataacgcttccgttaacaaccggaacagttagagtaacctctgggtttaccgctatccaatcgccatggtctgaaccgccgaattttccggtgtcagcttttattgtcatggtcttgcctgcattctctgaatccttcactgtataatcatatgattctccagcgtttacaacctgcgtaaaaccattgtttttctggaaatcccaagtagctgtcaaatatacttctacagcgtcttcaccttcaaccgctgctgtaaatttagaaccgaggaagtttccttttgagccggcaactgttgcataatatgttttacccttttcaacggctatatcttgttttacagcaacattggttcccggaagactaacgcttgactcggcatttcccatatagaaagtctttccgcttcctggtaaagcatatactgtccatgttccgtctccgggagcaacaaacttcagtccgttctttccgtcaggaacaactccgtttgaccaagagccgttatttgagccgcttgacagacccattgggaagtttatgccgtcaactgttcctccgttgccttgcttatccggtgaatagagaatagtaagacctctcatgaggtatgtgccctgaggtgttcctacctctgacgggtcagctttccaaaatgttgaataagcctttgacttatcagtatttgccgctacagcaatattgtcatatgtgccttcagcaaatgaaatcgacgctattctgttactttcggttattgctgtctgcgcggtagtttcagttggggttccgctgtttactgttacactaacagtattatcagttgtattaataacggcttcaactgtattccactttccgctttcaagaccttcaggaacaattgctaaataatccgctcccgcctggtctttaagcgttacaacgccggatgtgtttccatagacatcgtatgaaaccttaactataccaccggctaaaggcataatattaaacgctgtctcaaacggatttgtaactgcatatccggagttatttcctcctccgatagctgtcaagtttccgccgattttcgtcgtcttgttctcaaaatcagcatacaatatatcagctttatccgtaggaattgatacatcatatgatacagtttctttgagcaatgtcgacccctttacgcattggatagtataagttacatttcctattccattactttctccgtatgggtttctgattattgttccgtcatcattaataaatcctgaatattcagcccaaactttaacggctacgtcacctgttgaatctatttcaggaataacaacagttctgtcaagtacagcgtcaccgttttcagctttttcctgataattagaatcaatagcgtcctttgcagcctgcatagccgcattaaacactgacgggtcaattgacgggtctctagtaatagttatgtttatagtcttggaagttccgataagcttattatcagaacgtctgatataagcagtaatctcagccggtattgtatcactaaccggtcttataactgaaacttcgccgttttcactgatattcaaatactcgctctcagactcaaagtgaacatcataaccatcaaatccttcaataaatgaaggaagtgtaaagtcacctgatacctcatatgaatctgaatccaatttcttgattgtgtcgctctcaggaagttctaatgtctttatcttctcttttaccggtccccacattgtctttgcagccattggatcccagtcatcgccctctctaattaaataatcataagggttgatagcgagaacttcccattcgttcggaacgagacaatttctcttatcaagatttattggattgccggaagcgtcaaccgtaccatattcatagtatccggattctttagcaattgtcgaccagttgccccatcctgaatccataacagcaggcttagatgctccgccaacagttatattatcaattttaacacctattgcggctgttggtgaatctttaccgccccacggtcttccgaaatcaccctgggcaaaattagcatttgctgtagaagcacctgatacttttccgccccacatcaaatatccatacttagtggaagcattcttgcaggcagtcacatgtcctccggctgtctcgccgctctttgaatatcctgcccaattaaagttacagttgtcaaacacaagtgtatttccgccgaatatatagtcggtctgtccctctattgtacagttcttgaaatatacacggcttcctttagaacctgaatacaatgtatcctgactgctcttgaatgaacagttataaaattcaaccttatcgttatcttctatcgctatagcagcggctctttcagtaaacgatctgctatatacatcgctttctaaagttctttcaggcttaccgccggtgtcgctgtaaactcctccaaccggtgccggtttaacaccgtcatcaatttcttcttctgtcacatatctgttaaatgaattttcaaaaatcaaatctttaccaatgaagttgcccgcattcaaatgcgttgaacatccccatcttgctactgcctgattaagagcgtctctgccaagcgccttatttctctcataagcttccttgctgtaatatccgtctgtatctgcgctgtagtacatgtatccgataccgtaataccatgtcagcagaacatcgccttctgtgccatccatcttctgcatcgtaagataaggaacagttatatcaagctgttcacgataagtgcccggaacaatattgatttcgattctgtccgcctcgctggcatgattgtttagctttccggcatataccaaagcttctgaaacagtcttaaaagttttttgagcttcatctgtatcctttgaaccgtcaacagttaaaacattttccggattcgctgaaggaccgggagtttgggttggctcaaatgtagccggaggaatggtcggcggtcctggagttggtgtctcgggagccactgtcggtgtaggctgatcatgatcagctgtaggcgtaggacttgccggaggctctgttgggtcaggagtatcaccgaacgtaacatttacatcaacattctgtccaggcataatgaactttccgcctgccgttgcaatatctgttttatcctcagccactacttttacatttggatattttgccgcatcatccgatactgcgtcaacaacaacttctgcgccctgctgtactaaatattttgttgtgtctatcggcaattcagtaaagctgaagccataaatattcggctttgaaccatcaaggaacaaataatatgtagcaccgctcgtcacatcaaatgttactgttgtctgaagagtaccctctccttgaggatttaaatggttatattcttttccgttcacagcgtcagtcaagtattcacctgatacaccattttccgtaattcttactacactgagaggcttagtctgtccccagcctatagctacttcaacacgtccgtccgcagcaggcttaaagatatagaatgcaccgccgtttggaggactgtccggggttccgtttgatcctttatctgcacttgaataattcttagcattctgagttcctgtagatgtcgcgtcataaattacgcctccaatcattacaggctcaacaacagccgtgttaaacacattatcttttatatcatcagctgttccaaaggtaaccttaagcttttcacccactgaaacttcttcgcccggctgatatgtttttgtcccatcaattttataattaacacctttagctaatggatacggctctccgtttggctgtttcaaaactgccgttccgccagttacgctaactgttgacatataaacaggattaggagtcggagccattgtcggtgaagcagtaggctcatccggtccaattgttgctgtcggtgtcggtgttggctcttccggcttttctgttgctgtcggtgttggtgtcggctcttccggttttgctgttgctgttggaattggtgttggttcttccggttttgccgttgctgttggaattggcgttggttcttccggttttgccgttgctgttggctctgctgtcggttcatccggctttaccgttgatgtcggttccggaacagctgttggcacaacactattctcaataactaccctaaatacaggattatcactatccgtgtttgttgtgttaataacaaaatcataaacaccattttgtaatcctgacaaataatccttatttattgtcaatgtatttgtatcagaattatagacataatcattgctgctcaatggcttatcggacaaactcacaccatcaaaactgtctttttcagcaaattttataacagttgatgcttctgtatcgtttgaatcaatggttacaatttgcggttctattgaagctgtaccgttaattttaaccggatatgctaattctgcaaacttttcaccggtgtacggcgctgcagcagtagctactaccatcaaaatatgtccttgatccgcttcctgaacactataagtttcagaatctgcaccctctataggttcaaaagcttcggtgcttatatccctataccactgataaactacatattctttggctgcttccggaagcacatttgctgtcaatgtatcgccaacatatacgttaggttgatcgtctatctcaacagactcaagttcataacttggagttgctgttggttcaggattagcagttggacttccgttgctgacaaatccggcataaaacttcatagattttgttattctcttgctgtcaaaatcataagcttcattattttctgcgtcatttgcaagattctgcgacaaataccatccaacaaagtcaaacccctgttttgacggctcctcaggtctgtttgatttctgcaaataagtattctttgttatagtctttgttgcataaagttttgaatccacataaaacgtaagcttaacatcagatgacggagaaacattgccgcctgagcttccgcccgaattgggtctgaaatatgtattatcaggttttgctgtagcgtttggcgttacaacattacttatatttgaagacacattagcgtttctggacatatttacaacactgccggaaacctgtgaacctgtaatagtaacatctccgctcacctgaggagaaataactatactctgagcgactattccattcaaagttacgccgcccgtctttatcataactattccgccggcatactgagggccgtatgaacctggctccgtaatgtaaagcttaatcatattatcaataatcttaacaaattctgctcttgatatataatctttaggacgtatggttccatcctcataaccgccgatatatcctgcggctgtcattgcaccgacatatcctgttgcataatcagagatattttggtagtccgcgtattgtgtaataccggcctgagaattttcaaccgtcaaaccatatgcacgggcaagcattgtcattgcttcttcacgagtcatataattattcggagtcattgtgccgtctccgttaccggtgagagtaccggccgcaacaagtctcagcactgcatcagcaaaccagtctgaaactgacacatctgtaaatttgttgttagccttgtctatatagcctattacattttgagtcacctgcgctacctctgcgcgggttattgcgtcgtccggtctgaaatagccgccgtcgccctgaataactccataccctgaccaggtatcaatatagcttgcagcccaatgtccctctgtatcattgtactgtgccgctgaaacaacagtcataccgaaagtggtcaaaaccattgcaacagctaataccaaagccagtgttcttctaaaggatttcatatctaaaacccctccttattatattttattattatttttcaataaatgtggtaataaatctgtaaaaaactttagtcactttcatatatattaaacattttactataatttgcactcgttgtcaattatataattgtaatattttgtttaaaataacggtatttttgccatcgaggttaaaccatgcaaaaaaatttgaattcattataaaatatctgtagttttttgtctacgatgttaaataattaacgcaattattctgtctattattttatttttaataaaaattttatgtatttaattatagttcatcaaataaaaaaacgattggattgctccaaccgtttttttgttactttatataatataaaaattcaaatcttattaaacgtttagtttgctgcaacataatgaacaggagtccatccataaaaataatcttcaggacttggaatttctgttgctttatcatttggattatccctatcagcagtcaaatctgtagtgctgttaatattatgtacatagttaacataaagtttcgatgtactcagctctccgcccatttttgtccagccgttcggttttgagactccgtctaaagtaacgtcattaaagaaaactgcgcatcttgcaccgccccagtttcttccgaaaccgccgggagcaaatttcataccgcttatattactgttcttaactgtacagcctgtgaagaagtatcctgggtcagtttcagaacttgttttacaagctgaaatataaccgccatttgccttatccgagtaaccataccatgttaaattacaattttcaaacactacgctgttaccgccaaaaatgtaatctgtattacccaaaatatcacattcctttaaataagctgtgccgccggtatacaaagtatcctgacttgacaccatcttgcagcggtagaactccacgttatctgcatcaattgctacagcagcagctctttcagtagagtcttttatagtaacttttgtgcctttctttcttgtaaaattctttttatccggtccgcccggttcaacgccgtcagctatttcagcatccgttacatattgattaaatgtattttcaaaatcaatattctcagccaggaaattatccgctgtaatacgaatagtagcgccccatcttgttgcagtattcttcgtatcctttgcagctgcacaatcagcatcataataattattgctgcccattgagtaataaacatatcctataccataataatttgatacgactgccggattcgattcatcagcactcttaattgtgatattaggaacatcaactattacctgaccataatatgttccagggtcaagaactatagttacaggatttgaagttaaatcctcattaactctgcctgtcatagtacggattgaagccattgcctgatttatatccttatactctttgtcagatccaacatatacagtatcagcatatggcaccgcttctctgtttttcataaacaaaacatttttgcttggctcatcaactacaaccggaagactatacgatgttgacttcggagaaaaagtatatccatctccgccgctaataacagatacatcgtaggtttctcctgtaaacagtgaaacgttatagttaccatctgcgtcaggaacagctgtagcgtacggttcagactcaccggactttgtgaaagccaaaacagcatttatggaattgtcatatggttcaaggctgtttttcaaatcatttgagaatatagtgtaggctttgcctgttacattaatatcctgaggaatatatgtttttgttttgaatgcgatattatcaacgcccaaaactgcgcttcctccgccgggagtatatgcgccaactttatttattgcaagctgaggcactgtatccacttttttagttccgcctgtatttccaagctcaattgagcttctaagcgtataatctgcctcaccatcattctttgtatagatagaaactatattgtcagcttttgtatactctacttttactccataccacttatccggactataagtaaatccgcttattgggacgcttacagccttgttgtcagaaccaactgaaaaatagtcaacaatggcaagagctcctttatcggctgttttaagttcaaacacacgtccgtcgctggaatatgtgttgtttgcatcagcgttgttagtatcaaaaaatctcattaatatagtatcttttaaagtatcgccttttttgaaatctaattcagctgtaaatctatctccatccataggtgattctgcagcataagaccaaccatcctgctttgctgttcctgctgtagttgtatcattaaactcaaggtaattatccccgtcagctcttacttttacagttggcataatggtatcagcttctgcaacgtttactatgatatttttgccgtttgcattacttattgtatcaccggtattataagatgttccgccggcaatgtcattaaagttccaaacctcactggttacaggaccagaggtaggaccttccgaaggaataggacttgctgtagctgttgctacaggttcatctgtcgggccttctgttggttcagggcttgccgttaccacaggttcttctgtcggaccttctgttggttcaggacttgccgttaccacaggttcttctgtcggaccttctgttggttcaggacttgccgttaccactggctcttctgtcgggccttctgttggttcaggacttgccgttaccacaggttcttctgtcggtccctctgttggttcaggatttgctgttactacaggctcttccgtcggaccttctgttggttcaggacttgctgttgctaccggctcttctgtcggtccctctgtaggttctgaaggattaacagtagcagtcggttccggttcctctgtcggcactggacctgctgtaggacctccggtaatagaaaccataaacattgggttgtatacagcgtcttcagatacaataattgtgaacgcacttaatccatctgttaatccggcaaaataatctttcgaaattgtcagctttccagtttcttgattatatgtgtactgttcagcgttcagcatctttccgctctcatctgcaactccggttacattcataccttcgctgagggtaagggtggttgacgcgtcgtttccataagatactgtaactctttcaggatataccgaaggagcatcctttgccaaaactaatgaagaaacatcataaatggttccattatatttatttccgtcacctgtaactactaccttcaagtacttgcccttatcagcttcagtggctgtatatgagctctttgtcgcgccggaaattttttcacctgttccatggctttctgaagctctgtaccactgataagaaacataatttttagcagctgccggagcaagatttgctgccgttaatgtatcgcctacatatacgttaacgtaatcagttttattacctaccgcaatttcaacgtctgtcaaatcagaactgcttatatgacctgcatacaaattataatttttgttaacagctgaaaccgatgggtcaaatgttgtaccgctgcacttttcagctgcagcttttgaagtataccaaagaccatcccagttactctctttaggagtaggaatagcactctgagacaatttctttccttttgttacactctttgttttaactgtaccataattatcgccgtaataaaattttacagtaacagtgtttgcgcttgttcctccgcctgaattgcttccgccattgtttccgttaataattacattaggattgcttgaagcgttagggcttacaacatttcctgaattagatgtaacgttcgctgttgaagacaagtttataatatttcctgaaacctgagaacccataatagtaacatctccgtttacctgaggtgatactaccattcccttagcgataataccgcttaaggtaactccgcctgtcttaatcataaccaaaccgccgacgtactggcttccgtatgaaccgggctcggtaatataaagctttatcatattgtcaagaatcttaacaaactccgctctggagatataatccttaggacgaatggttccgtcttcataaccgccgacataactttcagctgtcatggctccaacatatcctgttgcataatcagaaatattctgataatcagcatactgggtaataccggcctgtgaattctcaactgtgagtccatatgcacgggcaagcattgtcattgcctcttcacgcgtcatatagttgtttggagacatagttccatcaccatttcccgtgagagctccggcagctgccagtttcaatatagcgtcagcataccaatctgatgcagatacatcagtaaatgtattggcagccttattaacataacttatcacgttttgagttacttgagctacttcagcacgcgtgatagcgtcgtcaggtctgaaataacctccgtcgccctgtataactccattgtctgaccatgtgtttatgtagctttctgcccaatgcccctgcgtatcactgtatgacgccgctgaaacgacagtcacacccatagctgtcagaaccattgccaaagctaacaccattgctaatgttctctttaaggttttcatttaaaccctccttgttgtagtcaaagcaagaatatacaatccctctaacttaaaaacaatctgtttactcctgctatgcttatataaattaattattttaacttttaaggcagcattgtctttttacactcaaaagacaaaaactgcatgtgttattttacagcatttactcaaatttgtcaagtgaaaccactctatataataccgaaaaactgtaggattacaatagatgtgttacaaatagaaaaaaagaatacggaaaactcataaattgtgttatagttatatcaccataatatcacatacgtatgtgatattatggtgatataactataacacaatttatgagttttccgtattctttttttctatttgtaacacatctattgtaatcctacaaagaacgaaaaagctaaaatataagtaagttgacaaacatttttagtaatgctatacttaaatttatagagtttgtattattttactaaataatattattatctattatttttataaaatttgtattttaaggagttatcagtatggacaatgttttggacggaagaataaaagaggttgctgaacgtataaaaaccttacgtgaaattgatggattaacgatggaagaagttgctgaaaagacttcagttgacatcgaaaaatataagcaaatcgaaaacggtgaaagtgattttagtttttcatttatatgtctttgcgctagagttttgggcgtagatgttacagatcttttagaaggacaaagcgcaactttgtcaggatatgagcttactcgtgccggtgaaggtatgaaaatagtaagacgtaaagaatttgaatataataatttggcgtctctttttaaaaatagaattgcagaaccatttcttgtaaccgcaccattttctgaagcggaacagcataaggatataaagctttcaaagcatgagggacaagagttagatattgttttaagcggtaagcttaaagtgcaaataggtgataatattgaaatattgaatcccggagatagtatttattacgacagcaagactcctcacggtatgattgctgttgattgtgacgcatgtaaattttatgcaatagtgctgactcccaacggcagagggacaagctatatagaaaatgttgaaataactcctgaaaagcctgttcctatccgtgaagattcagatgatatgatatataaaaactatcttaaaactgaaacggacaaaaacggtattgttaaatctatagattttattaatgaagataattttaattttgcatttgatattgttgataggcttgctgaaaaagctcctgataagctggctatgctgcatttgtccagagagaaagaagaacgcaggtttacttttgaagatatgaaaaagtattccgctaagactgcaaattattttaagtcacttggaataggaaaaggcgataaagtaatgcttgttttaaaacgccactatcaattctggttttctattcttgcattacataagataggtgctgttgtaatacccgcaacaaacctgcttgttgagcacgactttgattataggtttaaggcggctgaagtaaaggctatagtttgtacttcagatggtgatacggcacatcaggcagagcttggcgaaaaaaattgtgattttgatgtcttaaaaattatggttggaggcaagcgtgaaggctggcatgactttgacaatgaaattgaaaacttcagtgatgaattccctcgtcctcagaatctggatgaaactgcatgcggagacgaaactatgctgatgttctttacgtcaggcactaccggatatcctaagatagcaatgcatagccataaatatcctttggggcattttattactgcaaaatattggcagaatgtaaatcctgacggtattcattttactatatcagatactggctggggaaaagcgctgtggggaaaactctatggtcagtggatgtgtgaaggcgcagtattcacatatgattttgataaatttgaggcagaggatattttaccgctgtttaagaaatataatattacttctttctgcgcacctcctacgatgtttagattttttataaaagaagacttgggaaaatatgatttgtcttcactcgagtatgctactgttgcaggagaagcgcttaatcccgaagtatatcagcaattttataaacataccggtataaagcttatggagggatttggtcaaacagaaactactcttgtagtcggcaattttgttggtatgacgccaaaaccaggttctatgggcaaacccagtccgctgtatgatgttgatattgttttgccaaacggtaaatctgctgcagccggcgaagtcggtgaaatcgtgattaatactaagaacagtattccatgcggattatttaaaggatactataattctgaggaattaacgcgtgaagcatggcatgacggcgtatatcatatgggagatacggcttggcgtgacgaggacggttacttttggtatgttggaagaacagatgatgtcataaaatcatcaggttatcgtataggaccttttgaaattgaaagtgttatcatggaacttccttatgtattggaatgcgctattactcctgcaccggatccgatccgtggccaggtggttaaagctacaatagttttggtaaaaggtgttgaaggcagcgaagaaagaaaaaaagaagttcagaattatgtaaagaaacatacagctccttataagtatcctagaatagttgaatttgttgatgaactcccaaagacaataagcggcaagataaggcgcgttgagattagagataatgataataagcaataggtgagcaaaatgttcgtagataatcttatagaggaaataagcattacagaacttccaaatgtaaagataggaagttcagaggactttgaaggcggcaccggttgtactgttattttgtgtgtagacggagcccctgccggcgtagatgtaagaggaggggggccggcttcacgtgaaacacagcttttgaatcccactatggctatggataaaattaatgctgtggttctgagcggcggcagtgcttttggccttgatgcgtccggcggggttatgagttatttggaatccaaaggtattggatttgatgttggtgttactaaagttcctattgtttgtcaatcatctatttttgatttgacagttggttcaatgaaaaaaaggcctaattttgatatggcagtaaaagcttgtgaaaatgctgaaataaatatgcctgagcaaggctgttatggagccggcgttggagccactgtaggcaaagtgttgggaatggatcgttgtactaaaagcggaattggtatatatgcagcaaaattaggcggtcttatggttggcgctatagtagttgtaaatgctttcggagatatttttgattttgaaacaggaaagaaagttgcaggggtgctgaataaggataaaacaaaactatctgagaaagattgtcaagagttaatgtttgaattctattcaaattttgaaaatcaaataattacaaatacaacaattggtgctgttttaacaaatgctaactttgataaaacacatatgacaaaagttgctcaaatggctcaggacggttattcacgaagtatatgccctgttcacaccactcttgacggagatactatatatgcgttatcgctgggtgatttaaaagctgacattaatttggttggaactttatcggcatatgtgacgtctaaagcaatagttaatgctataaaattttccaaatcaatgtatggttttaaagctgtctgcgacttactctaaaaggtttgacattattttctgttgcatattcggttgatttatagtataatataaaataaatttagatttgaaaaaatcatgtattaaatatatagttaaggaaggttattatgaaaaaactgatttgtttgtttataagtttatcgataaccatcggtataatttgcagtttttctatatcaagctacgctgcatcacctattgaaaacatttatattaacggtcagcctattgattttagtgaggctgaacgtccgtacattcaaaatgatagaacaatgataccgcttagagccattgcagaagctttaggagctactgtatattggtttaatactgataaaaaaattcagattgtgagatatgatactacattacgtttggttattggcttgccaagacttgatatttataaaattgacggtgaagagcaagctttgaaagaaacagttgaactggacgctccggctttccagggagatataaccagagattttcgtacatttgtgcctgctagagcaatttcagaggcttttggagctgatgtaaacgctaaatttgttaatgatgatgaaggtaagaccgacagagcaatgaacgtatatattttagatgattatgatgaaactaaagaaaatgtagtttcgatagctgacttatatgataaaaaagatattcaagataaaactcttatttcaactgttggtataatatcaaaattggattctaaatattatttacaagatgaaaacgagccatataaaatgattcctattactgatattcctgaagtagaaaatttttggactgaacagcttggtgtagaaaataataaccctattggaacaaaagtgaaaattactactatggtatctttaaataatgagagtggatattctatacctattaaaagggctattaccggtataagaacaatagaaaaaagtaatagctcgtcacctgttgtaagcaatgaagataaaacaacagcaactccaaagccatcatatgaaaatttatttgctgattaacaagtttatacttaaaataataatgacctgtgattaatccgcaggtcatattttatatttgtttggttaaatcattaagacaatatttgcaaatcatttttcccctgtattcaactaaattatcttctctatcacagaaagcacagcaaggcgtaactctttgaataaatattttattgtctaatgtatatatttcaactcttattttttcatcgtctgattgacctagtacccgtctcatttcgctcggaataacgagacgtccatagtgatctaattcacgaatgacactagtaggtttcataattgctacctccttaacaatatgataataataccacatatatctaaatttgtcaattacaaaaggcaggtgtcattttttgaaattttttattttactatataactatatcaatataataaattaatattaacggtcggtatatttatgatattttctttttcttggattacatttttccattcgtattcatataagaatttagattttgcaaattttccgattgataatatatcacattgattttgatatattttttcaattaaatttttactatcattcattaaatcttcatagagcaattcataattatcttcagaaccattttgatttttcttggcaaatattttggtttcaatttcagcactgatttttttattctctatatttgtttttatattaggtgatgaactttttatcttgtagacttgattggtggattcggaagtaaaaaatatagaatctctttctatccctaaaagtatgtttataatttgacattcatgattacttagttctattttgggtatttccccggaaaacaagattgcccccgtaaatccatccggtgaaataattggaagatacccgtctcctgaactaccggtaagttttattaaaaatgttcttaaatttgtttgcaaagtttcggttgtagaagaatctgaaaataataattcataatatctagccgtactttcttcgagtgatgggttgactccatatagatactctttagcggtatctgtgcttgctatacatattttagtttccggacgcacatcattaatgttaataaaatcttcacagatattttttaaatacccatcactgttagttattgattttgaaaagacaataagttttaaatgtgaaagtgatggcgttttgcctataaatcttttaacgctctctaaaccgtcaaatatattatcagcatcaattgaaatattgtttactgacttattttctgtttcactttcttctgaacctgaattttgcgggtctgtattttctccggttgtcagcggatttgtaaattgaaatgagaatatcaatgaacctgtattttcgtctttatctacgccaacagctattgcatatgcggtatcttcaatatccctgttgtcgtaacagccgcaaagaggaactattccaattaacaataccaatattgacgcggttgttttcatgaagctgttttttggtaaaccaatttttttcataagaattcttatgaccgcaagtgatgttgataaatataatataccggatgtgattgaaataattatatttaacacatcaagccgggtgttaagccggtttatacctgaaaatcttgatatatggaacaatggattattttctgctacaaaaacagagtcggtcgggattgccagcagagatattatagtaaatatactgtaaatcccagcgccaataattgctgagtataatataatttttgaacggtttatatttttagacttttcttcaggcattattgttaaaaatacaattggaactattatttctgaaaatgcaaacagatgtttgaatccgctgcttatcgtggaagcgattccatttcctaatacaggaagagcattatatatatcatcatattttatactgcttattgaaattataatcaatccaattattattaacggaacgcatatactatgcagttttaagatagacgaaaagtctctgattccaacaatcagcactgtaacagcaattaatgtcaagacaatccaaagaggagtattgggataagcgctgttgtttattgtattaatcagctggtaaataaaatatatattatgtgatattaaataaccaattaatatcacaaatatagtgtttcttaaataagtgtttttaaggctcaatataaaatatcttttgaaaaagtaaactataaacaaaatcgccgtaaatacagcaaaactaaagattaatgccaaacatgatgaagaacctgtctcgtgaagcagaatgttcgaaaatcctataaatatttttatcagcagacagttaaatgttaaacaccatatacctaaattgatattttttttattcatagatatcactctgtttccttttattttttccactttctgcttatgtgcggctgttttatattatcttttgttttgagttcagccggacgtctttcttttttccatattggttttacaagcaatgattcagatgaacgaacgttaattccgaaatcggatagaaatggaaacccaaacgttttagtcgctgccaatcctgacaaagttatcattatagcagccaccagaccaactattccaaacaaatatgccgctgctatatatacaaattttaatacgctgagagatcttgaaagtgataaggttggtgtcgaaaatgctccaattccgcctattgatactattattattaatattggactgactatgcttgcttcaactgcagcctggcctaaaatcagtccaccgattataccaagagtgctgccaattgggtttggtactctgacggatgcctcttttataagttcaaatgatatttccattaagattaattctactataagtggaaatggaactttttcacggctggctgaaatagctattagtaagtcagtggggagaattgcctggtggtataacattacggcaataaacagtgcaggaagaagaattgacagagacatgccaaatattcgtactaatctcatcaaatttgcctcgggaacacgtacataattgtcttctgtggcttctatcaaatctaatgaagtagttggaactatcaatgcaaatgggctgccctgaactattattgcaacctttccctcgacaagcattgaggcaactctgtcgggtctctctgtttttaaggttctagtcataggaaaataagtggtgtcttctatcagcatttcaacatcacttgaagaaaatatatactcggtatctatatcttttaatcttctagttacctctttgataagcttgctgtttgttattccttcaatgtacattaaagcgcagggaattttatttgttttgcctaccggaatattagtggcggttaatttaggattttttaatatctttctaacaagtgctaaatttgtcattattgattcagcaaatgcttcctgaggtccggcaaggctgacttcttgagtaggcgaatcaactcctcttgagtcccagccttttatatcggctataaaacagcagtcgcagccgtctataaagataccgcattcaccaaaggagattttttctccgattaaatcaaaatcttcggcaatgcttagaggcgccactgatactatttgtttaaaaacaatatctttttttggtgttacgcttgtgtcatacgctttgcatgtgagcaaagaccgcataatatcacggtttaaaaatgtttgatttgacattccgtcatagtatattaaaaaagcgtcagccgtttcgtttttaaactcaactttaaattcgcgaaagttaaaatcaatattcttatctgagttaaacagctgttttacggtattctcattattttttaaatttgtatctatcaattttatcacctggattattttacccttatagccaaattgctattcagtttttatatagagattttgttcatataaactttacaattttatttttagttttaaggtttatttaagaaaactaatttataattttcgtatagtcaagtggaaatatttttaaggaggaataaaatgaaaaaagtattatgttcaatattctctgtatttatactattattcttaatgtcctttccgataacgtcgctggctgaggaaaacataaatgtttattatgaaggagaattattagtttttgatgtcgaacctcagattataaataattttactatggtaccggcaagaactatatttgaagctatgggcgcaaaggtaaaatgggacgaagaaactcagactgtaactgtgaaaaagaagaaaaaatcaatctctatgacaataggcggtcaaatcactaatcaagacggagaggtgataaatactgagacagttccagtcgtactaaatgacagaacattggttccggtgaaattaatatctgaatttttaggagctcaggtagaatggaatgaaaatacaaatactgtttatataaccgaaaaagaaaagattgaagatgattcatggaaagaaaattttggaacaattgatatgacttctatggaagtgagcggaagcggagttagagcagatgataaaattgtatatataaccgaaggcggagattttgaagtcagcggcaaaacagaagacggaatgattctcgtaaataccgatgaaaaagttaagcttagattaagtggtgtagacataacaaatagtgacggtccggcaatatattttgaaaataccgacaaaggatatataaccttaacagacgaaactgataatacgcttactgatagtgagcaatataattatgaagacgcaagcgctcccttattcagtgatgatgatttggagataaaaggcaatggttccttaataattaatgcgaattataaacatggtattgccggtgatgatgatataaagatagaaaatgggaatataacaataaattcaaaaataggtgacgggatacatgccaaatgtggtgttaagataataggaggaactttgaatattacttcagacggtgacggtatccagtcggttgaatggaatgttacagttgatggcggtgaaataaatataactactaccggggaaataatcggttcacgcaaaaacaataccggttttccaaaagattttgaaagaaatgatcagcaggacgacggagcgaaatttgattctaacactttaccggaaaatcgcagaaataacgtaaatgaaaaaggcgatatttcacaaatattaaataacattgatacttcagtctttgataatatgaccgttgaggaagtaactgaaaagcttaaatcaatggttgaaaacggagaattatcaataagtggaaatattgaagacacacagcaaactcaggaggaaggcgttactaccaatgaaaaaagttcaaaaggattaaaagcagcagaagatatttatataaactcaggaaaaataaatatacattcaattgaccatagtattcattcggaagatattactgagataaacggcggtgaattaaatatttattctgaagagggcaaaggtatgagcgctcacggaaatttgaatgttaatgcaggtgatataaatatagaatattccacagaaggaatagaaagtaaagcagaaatgacaatcaacagcggaaacattcatataatatccacagacgatgggttaaatggcggaggaacaggcagtgatagtatggaacatggtgtaatggattcgagtataattttagaacgtcttgctgagagaattgttaatggaaatattgataatcagcaaaataatatgccgcctgattttttccctggtaatacagaacaaataatgcagcagcccgattccctccctccaaatggtgaaagaccgactgataatggacaaaatatatctagttttaatgatccggctaattttggagggcagcgtacggacgttgataataacggtcattctatcactataaacggaggttatatctatattgacgcaatggcagacgcaattgactccaatggttttttggaagttaatggcggaacgatcatcctggacggtccaacgtgcggcggagacagtccgcttgatacagacggttccatgtggataaacggtggttatattgttgctgtcggaagcaatggtatgcttgaaataccaagtgatgattcaaaacaaaatgttttagtggtatcgttgtctgaagctgtacaaaaagagactataattaatatcaaaaattcaagcggtgaaaatataatgacatttaagccgtcaaaagaataccaggctttgattttcagctcacctgatttagattcagatgatacttatactatctcttatggtggaacagctgatagtgaaagtattgacggactgtatagtcagccttcaaattgcattggaggagctgaagttggaagtataacagcttctgaaaccatttcaaaactaggaacatttggaggaaggttcggcggcggtcgaggcggattttaatttatcaatagaagaggtgatgattaatacgctgaatctattgtttttcataacccctttttatattacccctttttatatttttatgactctccttattggagagtcttttttcttgacttaaaatgtaaaaaaatatataattatatcaaatagttataataccattaaaataataataagttaaattatgaggaggttaaattatgaaagtattattagtaaacggaagcccaaaacataaaggctgtacatacactgctttaagaatagtagcagatgaacttgaaaaaaacgggattgatacagaaatttttcaggttggtatgctccctataagagggtgtattggctgcggcatgtgcgctaaaaatggaaatggactatgtcagttcgatgacgatgtggtaaataaagctattctcagctgtagaactgccgatgcaataattataggctcacctgttcattatgcttctgcgtcaggcgcaataacttcatttttagacagattattctatgctggcggttctaacttggcatataaacccggagcagttgttgcaagctgcagaagagggggcgcatcagcaacgcttgatcaaatttcaaaatattttggcataacaaatatgcctattgtttgttcaaattattggaacatggttcatgggaatactcctgaggaagttttgaaagacgaagaaggcgttcagactatgagaatacttggaagaaatatggcatggattttgaaatctttaaatgcagcaaaagaggccggaatagaaccgcctgaacgtgaagcaaagataaaaacaaattatataagataacaaaaaggtcataatgtgaaataccacattatgaccttttatatatcattacatttaattttattacaaattttctattgcttcaatagagtttggtattggattttcggatattgattctattataccattgtcacatgcggacgcaatgtttggatcaatcggcagcttatccaatacttttatgttgtgtttttttgctatttcatctatatgactttctccgaaaatgtttatttttttgccgcagtcaggacaggttacataactcatattttcgacaagtccaataatcggaatattcattaactctgccattttcactgctttgccaacaatcattgagacaagctcctgcggtgaagtgacaataattataccgtcaactgggagtgactgaaaaactgtcagtggtacgtctccggttcccggcggcatatcaacaaacatataatcctcatcttcccaaactacttcactccaaaattgtttaactgttccggcaataataggacctctccaaactacaggttcagtatcgttttcaagcagcaaatttatagacataatgtcgataccaagctttgatttttcaggaagaataccaaagtcgctgccaacggccttattggttataccaaaagcttttggtattgacggtcctgttatatcagcgtccaaaattgcaacattgtgtccctttttcttcatgtttacagctaagagtgaagtgacgagagatttacctacgccgccttttccgctgacaatacctattaccttttttacagaactatgcgctcccaaatctaccttaaaactattttgttcctgttctctttcagagcaagtttcaccgcagcttgaacaatcatgtgtgcaattttcgctcattttcatatctccaatctaaataaattttaaaatattgaaaaacaacaagtttaaatataactttcttttccattcttgtcaagtatatagagtgtatataatttatttttgtataatttacaaatttatttatttgcatataaacaattgttatgatataatattttaaaattttgcggtttttgttattaatctgcgtatgaaaatttaaatatatttgatactaggagatagaatatgaagatttctcaactgtttaaaaataaaaatgacaaacctataatatcttttgaaatttttcctcccaaaaaggaagaggcttttgaaaatgtgggaattatgctaaaagaattgtcttatcttgaaccgaactttattagtgtaacctgcggagcaggaggaagttcaaacagaaataaaactatagagcttgcatcaaagataaaaaatgaatttaatattgagtctatggctcatatgacctgtatttcttctacacctgatagtgttcttgaagaggtgaaggtaatacaggacgaagggatagaaaatattttagccctgagaggagatattccaaaagaaggttttgaacctgaaaaagcaagttatagtcatgcctttgaactaataaaagaaattaagtcgaatagtgaactatgtgtggctgcaggagcttatcctgagggtcatattgaatgcgatgattttaataaaagtatagaacatatgaaaataaaagaagaagcgggtgcagatttttttgtctcacagctgttttttgataacagatacttttatagattttttgaagctgctgaaaaagccggtattaccgttccaataactcccggtataatgccaatgatgtctaagagtcagatttctaatatgatatttatgtgcggtgcgtctttgccttcggaaatggttagaattctatataaatatgaatccagccctgacgatcttctaaaagccggaatagagtatgccggaagacaaataagcgatttggtaaaaaataatacgtgtggtatacatctgtattctatgaacaaacctgagatagctaagcagcttcttgaatatgtataatataatttgagagagtggtttaatgtttaatattgagcttgataaaaatgaaatactaagatatttaggacatagaggtcaggaaattgatactaataccgaaactatgattgataactgtatagaggaaataaaaaaaatctcgcggtatagatatgtgtataagatttttgatataaaagtcggatatcatgatgcagtttcttgtatagatgttgttggtaccagtttaagacttgaaggcaatgatatatatgagcatttgcgcgaatgccgaaaatgtgccgttatggctgtgacgctcggtatagaagttgataacagcatacgtattgcacaagggaatgatatgctgaaggcggtagtaatggatagctgcgccactgaatttatcgaaaaggtttgcgatgaagttgaaaagaaaataaaagctgaggcggaagttttagggaaaggaacaaatttgcgcttttctcccggttatggagatttaccaattgacattcagaaaaatttactcgatgttcttgacgccaacagaaaaattggattgacagtgacgaacagctctttaatgatacccggaaagtcggttaccgcaataattggatttactgaaaatataagttttaaaaagaaaaaatcaaaatgcgatatttgttcaatgagagaaaattgtatgttcagaaaaggaggaactacttgtgagcgtggcagagtatataaagcataatagattattttttgacggagccatgggaaccatgcttcaaaaatccggtcttgagcctggaggtcttcctgaagtatataatattgagaaacctgaaacagtgcttgaaatacacaaagaatatgtaaaagcaggtgcagatgtaataacagcaaacacttttcaagctaatgagttgaaactgtctgactgcggatactcggtagaagagataataacagcaggagtgcagcttgctaaaaaaagcggcgcaaagttttcagctcttgatattggtcctttagggcagcttatggagcccatgggaacattatcttttgatgatgcgtatgaaatgtttaaacggcaattagttgcaggtgaaaaagccggtgctgatatagtcctgtttgagacgatgtctgatttgttggaggttaaggccggcattcttgctgcaagagaaaacacaaaactgccggtatttgtcacaatgacatttcaggaagacggaagaacatttgtcggctgtgaccctaagtcggttgctgtcacactttctggattaggagtagatgctttaggcgtaaactgttctctaggacccaaagaattattgccaactatagatgagctcataaaatactcacgggtaccggttatggttcagcctaatgcgggacttccgcatattgagaatgataagacagtttacaatattacggctgaggatttttctaactttatgaaaaaaattgcagaaaaaggcgtttctgttttaggcggatgctgcggcacaaccccggagtttattaaggaaacaagaaaattggttgaggatgttgagtttttcagtccggaatatgagcatgtaacagcagtgtcgtcaggaactaaaactgttatttttgataatgccgttacagttattggagagagaattaacccgaccggaaagaaaaaactgaaggaaaaattaagacaacaggattttaggtatttagtcagtgaagctatctcgcaaatgcataacagcgctgatgtccttgacgttaattgcggcttgccggagataaatgaagcggagactcttgcaaaagccgtcagtgagatacaggcggcagtaaacctgcctcttcagcttgacagcagtgacaaaaacgccgttgaagctggaatacgaaaatataatggtaagcctattattaattctgttaacggcaaacaagaaagtatggacgccatttttccaatagctaaaaaatatggtgcggttgttgtaggtttatgtcttgatgaaaccggaatacctgaaacggcagagggaagatataaaattgctgagaaaatagtacgtacagcggaaacatacggaataccaaaagaagatattattattgattgtttagtacttacagcttcagcccaacagaagttagttatagaaacaataaacgctatcaagctggtaaaagagagacttggggttaaaactgtgctcggagtaagcaacgtgtcattcgggcttcctgcgcgcccaattttaaacagtgtatttttggccgcaggttttggcgcaggactggattcggcaatagttaatccaatgagttttgatattatgaaaacagtccgagggtttaaagtgctgaacaatcaggatgttgacgctgtagattatatttcaaactatgcagattatgtgtctgaaaccggttccggcaaagatagtgccggaaaaattagtgataatacgaatgcggaaaaaggtacaaatgaagatattacttcttatatcattgatggaagacgtgaagaaacaggtatagcaacaaaagaaatgctcaaagatttagaccctataaaaataattgacaattattttattccggcacttgatattgtgggagatagatacgaaaagggaacggcgtttctgccgcagcttatccaatctgcagaggctgtaaaatgtggttttgaaattatacgtgacagttcaaaaaaagaaggagaaaataaaaaaggcaaaattgttttggctacagttaagggtgatattcacgatattggaaaaaatattgtaaaaatgctgctcgaaaattatggttatgatgtaattgacttaggtaaagacgttcctatagaaagtgttgtagacgctgtaattcagaatgatattaagctggtcggtctcagcgcattgatgacaacaacggtaaaaagtatgaaagatacaatttctgccttaagagaagcaggtagcaacgctaaggtagtagtcggcggagctgtattaaatgaggagtatgttaattttgtcggcgccgattattatggaaaagacgcaagagcaactgttaagattgctaatgaaatttttggatatgacaattaatattaggaggatttacagtgattattgattttcatacgcatgtttttccggacaagatatctaagagagcgattcattcgcttgagaataatattgtaaaaattcagggtgaaaactttccctccagaacagacggcagccttggtgagctgctgaaaacaatgaaagaggataatgttgactattctgtggttttaccaattgcaaccaccgttacccaatcaacatcaataaacaaatttgcagcggaaataaatggacataacggaatcatatcttttggaagcgttcacccattacaaaatgattgtgagaaagttctagaagaaatcaaagaggccggattattgggtataaagttacatccggaatatcagggggtttttgtgagttccccggaaataaaaagaattttaaaaaagacaaatgaacttggtctttatgttgtgtttcatgccggacaggatattggtatgccaaagcctgttcactgcatgccggaatgtttgaatcatgttttggattatataagcggagataagattattgcagctcatatgggcggctggaaagaatgggatgccgtagaaaaatacatagttggaacgccaataatgattgacacttcatatacggccggatttatggataaggaacaatttaaacgtattgttagaaatcatggaagtgataaggttttatttggaaccgataatccatggcaccgggtaaaagaagaaaaagagtttatagacagtatcggtcttgaaaaaattgaactagaaaatatatattataaaaacgcaaaaagaattttaaatatataattattaaaaacggacctgcattttttatgcggtccgttttttattaaattcatttaaatactcatttgacttcttatatctgttttttctaaaaatagcatataataaagctgcaaatgctattacagcaaagaaagtgtaaatattaaatgtcccataagctataaacgagccaagttggtagatacataaagaaattatatacgcaaatcccgtttgatataaaatagcaaatgcagtccattttttattattcatttctcttgctatcgctgccattgctgcacagcatggagcacataaaagattaaatgctaaaaatgaataggccgataatggtgtaaacgctgaagtcaatataccccaggaaccttcaattgaaccggattgcgaaaagtcaaacaggactgcaagagtgcttactatattttctttagcaataagccctgcaagtgtagcaacagtttctctccagctgccaaacccaagaggtataaaaatccatgatatccatcttccaatgtaagacagcagtccattagaaaagtcatttacaaatccaaaatttccgttttcaaagccgagatttgacaaaaaccatattattattgttgaaattaatatcactgttcctgctttttttataaatgaccatgagcggtcccacatacttctcaaaacatttgttgcggttggcatgtggtatggaggcaattccataacaaacggagtatcgtctccgctaaacgctgaggttttcttaagtataatcccagaaacaacaattgctgatattccaagcaaatatgcgcttggagccacccaccaggctccaccgaataaagctcctgaaaataaagcgataacaggaagttttgctccgcatgggataaaagttgttgttattattgtcatttttctgtcagccgggttttctatagttctggaagccataattcccggaacgccgcaccctgttccaattagaataggaataaatgattttcctgacagaccaaattttctgaaaacttcgtccataataaaagcaacgcgagacatatatccacagccttccaagaaggctagaaatataaaaagcaccattaattgaggtacaaaaccaagcacagcaccaacaccgccaattattccgtcaataatcaaactattgagccagtccgcagttccaataaagcttaagaaactttcaacaattaccgggatacccggtatccagtttccaaataaactccatccctctccaaatattccatcattcatccagtcggttacataagaaccaactattgtaactgaaacaaagtacataacaaacattactattataaaaattggtatagctgcaaacctatttgttagaactagatcaattttttctgataatgtctgttcattatcagacttccttatataacaatttttaataatagaggtaatataagcatatcgttcgttagtaattatactttcactgtcatcgttaaaagtcttttcggtctttttaattatatcttcaacgtttggaatataatttgaatttattaactcgttaatttttttatctctttcaaaaatttttatagcaaagaagcgtttttgagtatcagggatttccctgctaagcttatgagatataaatgcaagagtctcctcaagttttgggctaaaaagaagtggtcttaaaattttcttatttttatcagtttgagctaactctatagctttatctacagcctgagaaataccgtcatttttaagcgcagatgcctcaaaaaccggacagccgcttaaggcgtccgaaaatctttgaagatttaaaacatcgccttgtttttttaaaatatctgccatatttatgagaattacaacaggtattccaagttcaagcagctgagttgtaagatatagattgcgttctatgtttgtcccgtcgattacattcaaaatcacgtcaggacgttctagaattaaatattttcgagaaataacttcttctaatgtgtatggagataatgaatatatgccgggcaagtccataataataacatcgctgttatattttaaagtaccttcttttttttctacggtaacaccgggccaatttccgacatattgattcgatcctgttaaagcgttaaatatagtagtttttccgcaatttggatttccagcaagtgcgatttttacagtcatagatttctccttaaatatgtatgttaatcaatctctataagttcagcgtcacattttctaagagacagttcataacctcttactcttaattccattgggtctcccaaaggcgcaaatttacgaacacttatagcagtacctttcgttattcccatatccattattcttcgttttaatgcgccgctgccattaagtttgacaactttgacagtagtgccgcattctgcatctttaagcgttttcattaataaacactccttatcaaaagcatgatcaagctatttcctcacatataggttagcacactctaacttgtatgtcaattagtatttgtatagtaaaaaatatttatatattttattcaataggtataaatttaataactagatatttgtagaacattataaaaaataattaaaaagatatgaggcgctttaaaattaatataatatgttaattgatataaattgataataaaataagaatttagaatatggtataaatttgagtaaaattaacgcagaacttaaaattatttttaaaatatattatattaattaatagaatatcataaatttctattaaaaatctagttattatataatagctagatttaatttatttattatcttaattattataattatttattaaaatataacttattcattaaaacaaaagaaaatatacataaaagtgttgacatttttacaataatttggtaatatatactataataatattgtaaaaataatccaataaaatatgcggttattaaaaattatttttattttacacttgtattaacacataaatattcataataacacttattataaattactaaaatataatatatataatatagtgaaatataaactataaatagaaagttaaatttattaattttatctttacacatattattttagctatttatagttaaatggtttaattattgttaatcaattaatattttcattcagacattttaaatatttctttgaactataaaaaatagtatattacaatatatttagtatttcaaaaaaatttatttatgatatttgaattaattttaaagaaaggaagtgaaaaaatgaaaataagttcgtgttagagattgcagtattatatgaattttaattatacttttatcatccgaaaatattgtaatatattaattgttttaagtaatacatactttgaagaaaatatttttaaatttgttttatatgaaaatattaaatttgcattttaattaagtaaaaaaacaaaaaagaaaaaagagaaattaggagggagaaaaattgaagcgaaggttaataagtctaatattggcaatgtcaatgttaatatgtatgagtaattttggtatagtaaattctcagggggaagagaataacgacgttgatgtttctgaaaatgtaacgctgccggaattccagagtaaagcaacggagcaaccggttgatacaaccccggaacccacagaattaatatttactcaggagtcggttgaaacgcctgaaagttccaaaccgcaggaaactattcctacacctgcgttgctggataataatacagttgaaaatttttcacgtcagattgaaattatggttactacacaagacggaataattgtgtcgaatgcagatgtatcagttgatgaagatcatgctgtttctgattcgaatggtattgcacattttgacagtataccggtgggaaagcatatcctgaaagtgtatgctgccggatatagatacaaagaaacagtatttgttatccctggtaatagtaaagagacgtatgaacataatacatatttgatacaaaatgaaagtgagttaatgcttctctcagatgaaaatgatgaggagactgcctacagcgagaaagttaaaaaatattcggaaaatttagactatgcagatggcggtggatttaatatttcttacagccgttctgtcgacggaagcgtaggcacgggagttcctgttactcagtgtaatggatacatttattgttttgattcagacgccacatttgcatataatatatcaaacgatagttggtcaatttatccggtgattccaacgtacagagcatatgccggagttgcagcaataggtgatataatatatgtaattggaggggctggtccaaatgcggcaggcaacgaggttcaggcttttaacacaaatacaaaaacatggtctcaaaagtcaaacatgccgcagacaggctcatattttaacgctcatgctgtgaacggaaatatttacatcggcggaggtattgtgtcaggaaatccagcaggaatgtatccgagtgactccagcggagaggttagtctatataaatattcacctgaaaatgaccagtggacaattcctgtgcagaaaggagaagttcactctttaaagggaagagtttcaacagccgctaacggcaggatttattttactgccggacatgattggtatgctgatcagcattcaaatgatgtatatatttatgatactatagatgaaacatggaaaagaggcgaaataagaccctctaattcagataatattggtatattcggcggaatatttacaaacttaggtagttgcctgtattatcagggcggaacatcatggtttggcggtgacgatgaaggacataaatataccgtggaggacagaccgtgtctgtatgatccgtattatgattcatggatggagtttaatttatatgatgacaactataaactggagttggttgactatcagtcagtaacatcatacgggagcacaatatttatacctgaaaatgacaatgattcatttcgtttaaaaaaggtttcagtatttaattcgtatgtaaactcaccggaaatgtatagagaccataacatagcaataggcagcagtcatatacttaaagttgaagacggaaaagtgatggcaaaaggaaaaaatgactgcggacagctaggcaacggcacaaatattgattctgaggattttacagaagttaaagcagtgtggggaaataaaagaatagcaaaaacagaaacccgtgccaaaacatcatatgctctgacggaagatggagttttgtatggatggggagataattcaagcgcacagctaggagacggaacttatgttaataaaaatatacctgtagaaattctaacaggtatatctgatattacagcaggagtagaacacgcttctgcattgagacaggaaagttcagttccaaattatagaatatattcctggggttctaacaaagaaaagcaaatagatgatgacagtaaggttgaatattatgatttgccacgcggagtagacagtggagaaattatagaagccggaagctatcagtcatataggtataattctcttgatagtagcaaactttatgcttggggaaagaatgataaaggtcagctgggcggaagtatgccgaatccctttaattacttaaatgattatgacaacatcaaaaagattgcaaccggagctaatcatacggcaatgatatgcaatgataaccagctttatgtttttggtgataatacatattgccagctgggcagaaatttaggagaaaatgaaacgtatttatcggccccaatacgaacaggaatatatcctgaaaatgtttttgccggaggaaactctactgcatatgttttgcagggggaagtataccaggcaggacaggtatttgacggaaataacgcatcgttcaaaaaggttgaaaacactaaaaatataaatgaggttgcagtcggagacaagttttctataggtgttgatgtgaataaaacattatggcgctggggaagcctgacggacgacagcagttttgaattgaaatcttcaaaaaaataccaaaagccgcttaaatcagaatatatctatgattttattgatatagactcacagcgagcacagacaataggaataaacagcgaaggaaaagtagttgcttggggcacaggatactatggagacggaacagataaggaagttaaacacaacgctcctcatgaaatagttttaggagacggcgttatcccaaaagcaattgagcgcggaaagaattttaatttggtgcttgatacagagggcaatgtatggggatttggaagtaatactaataagcctatgggcggcatggccggtaaatataaagtaccgactaaaatatcagatatatcagatgtaaagcagatcacagcaggagacggtttcagtattttcctgaaaaacgacggaacgctttggggtatgggagccaatactttaggacagttatgtcagggtaataacacagattcaaaagtcccggttcaaataacggataaaaataactttacaaaagtatcagccggagacagctttgttgctgcaattgccggaaatgaagtatatacttggggtgaagggacagacggacagcttggaaacggaacggatagttctgcaaacactcctcaaaaacttcaggtaagctttgatgagccatacgaaaaatttgtcgatataaaaaccagcgttaattattgtatagctttaaccaacaaaggcaacgtatacagctggggcagaaacgcatcaggtcagttgggtcatggggataaagtgagcagaaatatacctgcaaaagtaccggggcttagcgatataaaatcagtatttgctgaaaacttgcagagctttgcaataaaaaatgacggaacagtgtacgcatggggaaatggctctaactatcagctcggattaaataagacaggaacacagcagtctccggcagttgttacaagtctggcaggaaaagaaataacagaaatagtatgcggaaacggatacagcatagcgctgagccgatatggatatatgtattcatttggttccaatatagacggctgtatgccggtatattcagaagaggcacagaagtatagctcaatcgagatagaggatatgcgctggctgagaaaatatatgagtgataatataggaaacaatataaccgaaaatatatcactgccggcggagggacccaaaggaagcaaaataacatggacaagcagccacgagggatacataagcaacacgggagaagtacaccgcccggacgcatacggaaaagatacagatgtaacactaacggcagaaataggacaatacgataacggcgagaaggcaagatttgatttaactgtgctgcaagacgcatcaataaaaccgtcaaccgatgtgccgatacgttctataggtatggaatatgaccagatgtatccggaaacagccccggatgtatatcccgaaataacagcagcgtcaatgacagttatagatgaaagcaaaggaatatatcaactgaccatacgagacgaccagtatagatgttctgaaaaagcggtgccattctttttctggagtgcgagacaaggaacatttctgcctgttgatggctgtgacgattatagaagcgtacagtttacagttgatccggacgcattgagaaaacagataaaagttattgtaggtataggagatggtttgggttacattgacagaaaatcaattcttattcaaacaagcggtactgcggaagcaagcgtgcagacggcagattcagaaaatataatgatattggcaatggaaaatgagcttacccaggaagacataagcaaggatatagaagagacaggctcggcagtgacattggcaataggaattgataattcagctgatatgcagaagtttgaccagggttcaacaaaaagatgggcaagttcagttgaggggctgatagattcggcaaataaaggaacagaaatagttttagtggacgatacaaactatggatatgcaaaagacgcagaaagcgcaaagaattcactggaactaatgatgtccaaggaatattcgggaacaacagatgcggaaactatgcttgcacgatgcgaggaagcgttaaatgaggaggaaagtatatctataaatgggaacaaagtgataactttattcgtccaaaaaataacagataaaaccgcattggaagaaaagatagaagaacttgcaaataagggtatcacagtatatgtaatgttactcggcggaggatatgaaggaagcaacgaagaagtaataaactgtgaaacagagctgaatctgaggctaaatgtatcagagctgtacggagcctttaataacatatcacaggttatgagcctttcggagaatgaaacgtccgctttttcgaacggtaatatatataatagcgacttcagagcaggaaaacatgattttgctaatgttactgccaaccaatttggtgcgtcaattgcttacgcaggttgccgcgttaggtgaaccatcatctgaacacgcagtgttcaatatacaaatatcacaacttatatgacacaaatgttatacaaatatgcatatatattgtacttaataaaaatatcataactatatcgtatatatattatacttaataaaaatatcataactatatcgtatatatattgtacttaataaaaatatcataactatatcgtatatatattgtacttaataaaaatatatgtgatattatggtgatataactataacacaatttatgagttttccgtattctttttttctctttgtaacacatctattgtaatcctacaatataataaacaaaatttaaaattcagtcttgacatataaaaaaaatcatgttataatgtcaaagttgaatttaggggtatagctcagttggtagagcagcggtctccaaaaccgcgtgccgtgagttcaaatcttactacccctgccaataaatagcctgaaatgaaaatttcgggctttttttgtaaataaaaggagtttttatatgagttttacatttaaaaaagaaatgccttcagcggaacacttgaaagaacttttaccggtaccgtctaacagcgcagaaatccgtattaaacgcataagagaaatagaagccgttttgtccggcaaagacaacagaatacttcttataataggtccgtgctcggctgacaacgaagattctgtctgcgactacatatcacggctcgcctctgttcagaatgaagtgaatgataaaattcttttggtgccgagagtatacaccaataaacccagaaccaccggagagggttataaaggcatgatgcaccagcccgaccctaatgaagcgcccaacgcttttgaaggtataaaagcgatacgtcaaatgcaccttagagttcttagagagacaggttttgtatctgctgatgaaatgctctatccgggcaaccacccatatctagacgatcttttaggatatgttgctgtaggcgcccgctcagttgaaaaccaacagcataggcttgttgccagcggacttgatatgcccatcggtatgaaaaacggtaccggcggcgataccggagttatgtttaacgcaatttatgctgcgcagcatggtcatgacttcatataccaaaaccatgaggtgactacaaatgggaatccatacgctcacgctatcctcagaggcggaatagacgaacgcggcagaaacataccaaactatcattatgaagacctgcttagaatagccagcgagtatgatgagaaaggttttgaaaaccctgctgtaattattgataccaatcataataattctgcaaaacagtttaatcagcagcctcggatagcctcagaagttatgcacagtatggcgtacgaaccgcttcttaggaaaatgataaaaggctttatggttgaaagttacatcgaagagggtaatcaaaagattggagaaaacagcatttatggaaaatctattacagacccttgtttgggctggaaagataccgaaatgatgatttataaactggctgaccagcttatataataattttccaatcttatagatgtttatacaaattataaaatagtataagagcactcaacttattaataattaataacattatcagcaattcaaacaaaaaaagtaaaaattaacaatgacacaaaagaccgcttatgatataataaattataggcggttctttttatactgtcaaatcgttggcagcccattttctcacgaaaaatataccgcttttataaaccattttatattacgcttcaaattttctttacaagaaaaataacagagagtgataatcacatcttttatctgccttataaattcaacctttgaacggaaaactgattaatattatcctgataccagaaaataatatatgaacttatataaaatattacctctctttttcgtgcagataaagagaggacaaccattgcagcaaatattataattatcattgaaaaggagagaaaaggactgaatagaaagattaaacaattgaagtatatttgaaccatgccccgagaaaaacgcccaatataaagtatagatacttataactaaaaaataaggagttaaactatggataatcaatttatgttatttcttgaaacggttgatgagcgctttcaagattttgtaacccaaataaacaactatttaacagaacaaggatgtaagtgtgacataaaagaagctaaaagcggatatgttgtttcctatattttaaacaaaccaaaaaggactttagctaactttgtaacccgcaaaaccggtatgaagattagaatttatcctgaacacctaaataattaccaagactttttaaacacacttcctgagaaaatgaaaaaggatatacggaaggcgtctgtctgtaaacgactgctcaatcctgatgattgcaatccgaaatgtgtaaccggttattcttttgaactggacggcgagcaatatcaaaaatgccgttatatggcttttatgcccgttttaagcgaagaaaacaatccatatattaagcagttcttggaaagagaattatcatattgcggatgagcatcaaaggtttatttatttcaatgcaggttgatatagttttcggagaatgccaaaaatcattgtttctataagatacattatataaaattcttttaaaaaattatacagtaagttgatatataaaaataaaaaccgcttattccagttaataaggaacgtgcggtttttattaagcttttatatttaagcaacatttatatcgttttatatttggataaaaaatggcaaacaccttttgtgttcgccatctttttattatatcattttaaaatcgtcttttttaatacttactgtcaccggacgttttgttaaattaattcttatttctagctttggcacgaagctgattattcaatatcttttttctgattcttaaactttcaggtgtaacttcaagaagttcatcctccgccaaaaactctaagcaagcctcaaggctcatctgaacgggcggaaccagtttaagagcgtcatcgcttccggaagcacgggtatttgtcagctgttttttcttacaaacattaacgttcatatcctccgctttagggtttattccaacaaccataccttcgtatactttagttcccggagtaataaacagcgagcctctgtcctgaaccttaaacaaaccgtatcctacggcttcaccggtctcaaacgccaccaaagaaccagtgtgcctgctgcttatctcacccttatatggctgatactcataaaagactgagttcagtataccctcgccctttgtatcagttaaaaactcatttctgtatcccagcaacccgcgggcaggtattaaatattcaagtttcattcttccgccctgaggagccatcgaaaccatttcgcctttacgctgtccgattttatccattaccgcgcctacgctctcttcaggaacatcaataataagtctttctattggttcacattttactccgtcgacttccttatacagaactcttggagttccgactgaaaactcatatccctcgcggcgcatagtttcaatcaaaatagaaatgtgcatttcacctctaccagcaacattaaaactgtctgttgactctccttctgttaccctcaatgaaacatcctttaaaagttctctcatcaaacggtcgcgcagctggcgtgaagttacaaacttaccctccctgcccgcaaacggactgtcatttacagaaaacgtcatctcaatagtaggctcgcttatctttacaaacggaagaggagccggatcctcaggtgaagctattgtatctccgatagttatttcaggaatacccgaaaaacatataatatccccaacttttgcctcatcaacagcagttctgttaagaccgtctatctgataaagattaaccatttttgccttatatggttcatggttattatgatattcagataccataacttcctgattctgttttacacagcctctctcaattctgccgattccgattctgcccacataatcattataatctattgaagacaccagcatttgcatagggccatcagcatctccctctggcgccgggatataatcttttattgtttcaaacagcaccttaaggtcttttccctcttcatactgggaaagcgaagcggttcctgccctgcctgaacagaacagtatgggactttccaactgttcgtcattggcgtcaagctctataagaagatcaagaatttcatcagggatttcatcaagtctggcgtcggctctatctattttattaaccacaacaataacacgatggttcatttcaagagccttttgaagcacaaatctcgtttgaggcataggaccttcagcagcgtcaacaagcaaaataacaccgtttaccatcttcagaatacgctcaacctctccgctgaaatcagcgtgacccggcgtatcaattatattcatctttataccgtcgtaatatacagacgtgtttttagcaagtatagtgataccgcgttcacgttccaaatcgttgttatccataacgcgttcctcaacgacctggttctctctataaactccgccctgtttcagcatttcatcaactagcgtcgtcttaccatggtcaacgtgtgctattatcgcaatatttctcaaatcttctcttaccataaattttactccttctaacaagaaaatagacacggcactccgtgtctcttacattttaatattataccacagaaaaacatgttctgtaaacgtaaaatatattcaaaatttgcaaataatatgcaataaatcttgatatatttttactttttatataaaaagtttgttctcttttctgtcggcgcaaaccttatgaagttttaaagacaccatctttaaagcaagcttggaaacagctctggctccgttagggcaaacaggaacgcatctcatacaggcaatacactttttcgaatctgctttataatcttttcctatagctccaaccggacatttttcagcacatataccgcaagatacgcattgtttagttggctgaggtgaaaatggaaccccgccaaaatcacggaacttctcatttccgggtatattttttatcccaattatattatgtgaatttaaaagtttgtttttaaactctttcgcataatcttttatttctttaatatctttactatcaggtctgtcagccgctatatcagtaactatagaatgccttgaaactatggaagccgctcctgcaacaacaaatccgttgttttcagcaatgcttctcagctcagttaaagtatcatcataagacctgtttccatatgtagttaaaataaatgcaggagtattatttcccctaatatttttaattctttcggcggcaatagccggaacccttcctccaaatgacggaactccaataactgctaatgtatttttgtcaatctcacaaccatattcctcgttgtcggttacatccaaatattcagccggctcaccaaaagccttgcagaacaactcaataaccctttttgtattacccgtagcgctaaaataaattgctttcactccattaattttcatttcttctcctcttttctaagctagaatccaaattccatcaacgtcactatgtcttaatttaaactcattatatgcctttactgccaattccctatcatcaaacattccaaaaacagcacttccgcttccgctcatcatggcaatatcagctcccaaattcagcatttcagctttatatacattaacctgcggacaaatctgtaccgccgaattctcaagtatatttcccataaatggctgaatctttttcaaatctccagactttataccggaaataattttgtcaatatccaaatttacaggcttattattataatcaagatgctcatagacccactttgttgaaatactctgtatcggtttggctatcaaataacaaacttcaggaagttcgggcaaaaccgtcaatctttcaccaatgccctcagccaaagcacagcctcccataacacagaacggaacgtcagcgccaagcttttcacccattttcattctttcttccaaagataacggagaatccaaaagcttatttaacccgtttataactcctgcggcatcggaactgcctcctgccattccggctcccattggtatatgcttttctatatatatatcacagccgccatcaaattttatggctttaaaaaactcattggcagctttccatgctaaattgctctcatcaacgggcatatttatatcacttccggcaatttctatcccctcctcatcttttaaagatatggttatcacatcaaaaataccaacctgagtcattatcattctaacttcatgataaccattcggatattttccaagaacatctattgcaatatttattttggcgctgcatttttcagttatcgattttaccattacttacctccgcatttataccagccaactcttttcctgaattatactccttcaatgaataaatgtcaattatacaaaaaatacgtctccataaaagagacgtatttacaatattataatataaaataattaacttcaaaatttattttactgaacagaaagcaccaactgatctcttcttatatatccctgatttccatcataatctaccctggcataggtatcagaaacaatctccacaagaccaacaggcgtctcagccgcaagagttagaataatgcctgctccgcttcttggctggtcaagcatctctacagcgccggaacgccaaacatacctgacagcggaatattgtttcggcggagaataattcgataagtaaaacttagctacatatccatacatattgtcatattttacacgagcgtattcgctgtttgcatcctcaacatatcctatccgtgttccataaggaatggtagttataattgttgatgatgcgcttggtttctgtctaaaatttactgcattcgccacatttgtaacatatctatatccgacaacctcctgagaacgctcatacgctgcaatctcatcctcaatttctcccctaagtatttcagcggtattgcgcacgtcatcgcttagattcccttgctcaaggaaagcgttcactctggcataagctccataatagtcaccgttttctaccatttttctaatatcatttagagtacggtaaggcaaataattaatttgttccttaatatctgaaacaagttggttatattcgtcaaccaacgccggagtagttctgtacaaataaaaatcactcaaagcgtcagccgcctcataatacagtccctgattatacaaatttatagcattatcaagatatgctcttgtatcagccagctgctgttcaatctcgttaggcagtccattagccattagttggatatttcgctcagttgtttctttttgagtataaaactcagcaagaccaataggatttataattcttgcggattctatttcactatctgtcaccaaaccaattatagcttgtgcctgataaaaatcaccgttaaaattataattaataatattagttagcttatcctcaaacgatgctttatagtaaaccggtaagtttgttatattactataagatgaatcactgttaataaaaactgtggtggaagtctcgtcccatttcacactcattcccagcttctcagatacaaatctaaccgggaccattgtcacgctgtcatttaaaacaaaaggagcttcaggaagctggtatactgcatcttttccatccgtaacattgacgcttccaatagtcatatttaaaattatattttctttagtaatagtaacgcattgttctgcctcgttccattcaacattgcaccccaatgtctcagagacaattcttaccggaacaaaagtagtatcatttataactacgcccggttgcgaagactgaacaactttatcatttacataaatagttacattgttataatcagcaaacactgttccgcaaataagacaaaccattgctgcaaaccccaaaaagctaaaaaatacctttttcataacactgccccctttaatatattaccttccttttatactattattatacaataaaacttttgttccgtcaatcatatttacgcatttgttaagaacaaatattttattataaacatttatatatcaaacgaaataattcgacatttttcttaaaaattgttatatcgttgtaatttttatttttataaactatattgacataaatattttatcgtgttatactgtgctcgtacaaaattaaaggaggcaattatatgaaatttgtaaaaagattattagtcataacggcagcgtgtgcaatgatactaagcttagcgtcatgcggaaacggcgactcaaacaaagcgactgataccatgaagcaaactgaaccgacctcagcatcagattcggctgtaacaaatgaaccttcggcaagcgatgaaatcggaaataatgtcgatgatgtaaaaaaacaggccgaagctatcgaagagagccgcgaatccctcagagctcttattggaaaagcgtctactctcagttctgaagaggacatagccgcatggggcaaagaattttctgatattaaaaatgatttagaggaaaaaacaaaaactctctcagacactatagcaaacgcccccgaggaatatcaggaatcttacggaaaaatatcagatgctgccacagctgcttatgacgcaatggccggttttgaatctgctgttacttccgctgtcagcggagatgtatcagagtttaaatcaaaagtttcagactttttgggcaaaatgggagatgcagacaaactctgggataacgcagaagttagataacatcgtgttataatataaatattaagtaaaagttaaactattgatatgcaatagtttacgcggttacaattatttaaaattaatatatttttaaaagtagtataaaaataagcatagtcaaaagttttattaagctctgactatgcttatgttatattaaacgtgtgttatacaatattaacatattatactttaaatcatgtaaactaagacttggaataaaaagattacatttaaatcggactgaaatattaaatttaagtattataaacataaaaatatgatttagcaagtatcggagggctgtgaccacacttttttaaagtgtgtgttatacaaatcaattgttttgataaagttgtaatgtctgtgaccccatctgcaaggtgggcgtgatacaaagtgacctgttttaattagccttcaatgtcaattgtggctacacttttatttgaaagtgtatgttatacaaaccatataatgttatatatactttaaacgccaataattaacttagttgtcatatataaataacttggttgtgatatgcagatgaaatctgcctcgttaggcgcgcagttccggttacttttactataaaagaattatgataaactattctatttttattcacgcttcgcgtgagatgaatgttcacctaacgaggtgtgcaagcacacaatacatcacaactaagcaatttattgacattgaaggctaattaaaacaggtcactttgtatcacaccaacctttacaggtcgggtcacaccctgccgatgttcactataacacactatttatagaataatatttctaaaccaaatttattataaattgtggttttgcaagcatcggcagggcaaacgcagtttgccgcgttaggcgcgcagcttcagttatttttactataaaagatttatgacaaatttctctacttatattcacgcttcgcgtgagatgacagctcacctaacgaggtgtgcaagcacacaatacatcacaactaagcaatttattgacgttgaaggctataataaaacaagttactttgtatcacaccaacctttacaggtcgggtcacaccctgccgatgttcactataacacactatttatagaataatatttctaaaacaaatttattataaaatgtggttttgcaagcatcggcagagcaaacgcagtttgcctcgttaggcgcgcagttccggttacttttattatataagaattatgacaaactactccatgtgtgtttacgcatgcgcggtgtaaaataaaaattattgccgcaactgatcgcagagaacaaatacaaaccttaaacacacaaaatttagtatctgctcttaacaaaacgaacgccttttaatttgggcgtccgtttcgatctaattaatattatccgttctgcacaatcactttaaaaactttctaattatatttttggctataggaaccgcagactttcctcccgaagttgccgcattttcaagaaccaccgcaacacatatagtcggattttctacaggagcataacctacaaaccaagcatggtctttatcagtttcattctcagctgttcccgtcttgccggccactgttataccgctgatttgagcccctgtacctgttccatcctcaacaacgcctatcatcatatcttcgatatagtcagcacatgcagttccaatgctgtcatataaaactgaaggctttgtctgtcctataacagtcccgttctcggttgttacagtctccacgagatacggtttcatcatctttccattattagcaacagcgctcgccatcattgccacatgcagaggagtcataaccagcccaccctgtcctatagacaccaaggcgccgtctaaatctgtcatctttttatattgaatctgactttgtgaaaccggaatatcaaagtcaaatgatttgtttaccccaaacttttcagcttcagcttttaccgcgtccgcacccatctcataccctaaagtacaaaacacataattactggacacttcaaatgcggtctttatatctaattttccaaaagattctttattataattatatactgttacgtcgtcttttttaaataatccttcatcgtcaaaagtttcagtggtcattccgttgtcatacactcctgcagctgtaacaattttatatgtcgaacccggcggatataacccctgtgttgcccttgctaaaaacggtgaattctcatcctccatcattgacggccaatccttttcaattgtttccggattaaagtcgggcagactcaccattgccaagatttgtccggtagtaggttccatagccacaatagctccatcccttccgtcgagctgttcatatgcgtactcctgaagttcatcgtttatagtaagattgagattattaccgtgctttatctcattcaaagtcaagcttattgtgccttttccaataaggtcatcatcatggctcatttcaagctgagtttttccatacacctgagaacaatatccgattatgtgagaatataatcttccctttggatacttcctgattctagcgtcaccgtctatctccgtttcggcaagcagcaccccgtcctgagaatatatctctccgcgctgaacctgctgttcactctcccactggcgtttattatatgagtttgtatacacatccttggcacgaaacatattaaaccacaataaataagttaccagcgccaaaaaaagcagcgagatggcaatcaggacgcgtatgattcttttattcgtcctcattttcggtcatctccccctttctttctgtcttcgcggatattgcctgaactattcccaacgaagcaaaacttataactatagacgtacctccatagctgacaaacggcagtgtaattcccgtcagaggtatcatttttgtaactccgcctataatgataaatgtttgaatagcaaacataaccgtaacgccaaagctaacagctttatcataagggtcgctggccataattgaaatcttaaaacatctgtacgcaattaagaaaaacaataggattactgcaactcctccgaaaactcccatttcttcacagatagcagcaaatataaaatctgagtgaacttcgggtatataatacggcgaaccgtttcctaatccgcgtccaaaataaccgcctgacgcaatagcaaaaagcgactgtgtaatttgatagcccttactggctatatcagaccatgggtcaagccatgttgatattctgacctgtatatgatacaaaaacttatatcccaaaataccgataattccaagcgcacctatatttaaaaatagtaattttttgtctttctcatatacatacaccataaacaaatagatagagaaaagaaccaatatagttccccaatctctttgaagcaccaaaaatcccacaaaaatataagtaatagccaaagttatccacttcggagaaagttttcccagcacaggcttagaccatgctcccgagtaatagcacgctaagcacattatatacataattttagttatctctgagggctgaaaagtaataggtccaaatgatacccaattctttgagccgtttatagtagttcccaaaaccagggtgaacaaaaacaatcctacaccgattgcaaaataaatataccaaaatctgtcccatattttaatattataataaataaaataagctacaaaaaaagctgcgccgcctactagtatccaaatgatttgcctgaaaccgtaatcgaggtttatgcggcagagcaataataccccaatagacataagcataaacgccataagcattataaacttgtcccccatacggcatatcactaaaactgtatacatgacaagaaaaagaacaagaacggctatcccggtatataccacgttcatattataactttttgatatatacagcagtccgaatccgagtatatccaataaaatcaaaagataagccggctttctgtaattagccgatttaatacgttctgttcccattttctcaccgccaattcttaaaaatataatttatgtctcaaatataaaattcaagccgccgaccgtaatctgatcctcggtatcaagtataacctcctgccggattctctgcccgttaacatatgtgccgttccggctccctaaatcctcaagataccattcgccgtcttcataccaaataattaaatgcttctgagaaataaatttctcatttataattatatcacactcacggcttcggcctaaaattgcttctccataaatattatacctatgtttaagaggcgctgaaagttcaacctttgattttatcggtctcaggcttgaacacgccgcatcatttatactattgtcctcaaaccggctcatttttttgacatccagatagatcagcctgatgacaaaaataataaacacatatattataactgtaaaaacatagcttaatatcgtggaaataaaactatatatagtcatgttgcaatctcccttcagtcaaacctagtattcattccaataatcatcgtcgccgccggcgtcggccgcgttttcattaacaatcttatgctttttctccataaaccaaagaagaagcgcaaaaattaatccgacagcaaaacaccccaagtataaataaacaattggcggaggatcaaatctcattgttgcaagcggattataaaaagcggcgcttgatttatacccggattcccctgcgtcaaattttgccggcgcaacctcgcacatacgttcaaaaagtctatataaaaactcagcggcagaactccggtcaaatctattttcagtttttgtaagcgacattccgtcattaataataccttctcttgcaccaagagcaagttttcccaatgatgcttttttcatatactgaatatcaggataattcaaatatatacttgcatacggtctgtctgtatcattccctaaatcaggaagataatatcccttatagtcaacaagcaatgccaagctcattgtaaacgtgtcttcgagacccacagcggaattaccgttaaatctaaggccaccctggtcggaataaagctttatccccgcctcttctatagacgccacatacatagactgtgggtccgactcgtcaacgtcattatattgcgccctcgcttcagtatccaccgtaaacaatattccggaaaccgctctggcggcatcataattggtatattggtcatagggtctaaaacgcccgcctaccgtagcaaagtaatcttttgagaccaacagttttatatgcttctgctcatcttcacttaaatcaccaatgtcagaaatctcaggaacacttgctttcactttaaatagaccggaagtgtttgtcttaaactcaagagctttattactggagtcaaatattcctcctatattaaagtccctgccgtcgctggttgtaaacacgctgtcataagcgttttcagcggggatagaaaagttgactttagccggcagtttttctatcctctcattattttgatcaaaaaagtttattatatatccgccgccgattgcggaacccatttcaacagtaaattcaccattatcatcaattatcctattacaagttgctttgtccatgataacactgtgactgttatcgcctataagtatacgcatgttagatattcccaaatcatcatcttttaaatcactgtcaaaaataatttttggaggcaaagcgtcatttaattcttttataactatctgtataggaacaacaatatttttgttaggtttgatatccttttctcctgcaattttccataattcctgactggttgcagcagctgcaacagccgagtctctgatattagtcaaattaatatttacggtattattctcagctttaagctcaattttagaatttctcagacaagccgctgatatatacgccgcaatatcgtttacacccggaccattcggagaattttctccaagtcctgcgagaatttctgttaaataatcgccatactcttttatggttgtaaacccgccggtacgctcatagtcaatatttatattagacaaagcctccgaacccttatcggcagcgtctaaaaatcccattttaatgtatttatcatcaattgccgaaacagtaccgagctccgttgcaacatatcctgagctagtatcagcagttttcagttttgcataatataatgaaccattgtgcataccttcagctgattccaaatattccggaatataatgtactaaaaacgttccgtctttcaacttaacaaagtactgtattttacagctttccggagatcttgtccacatagttccgctcgggtcctgctgcggcggatgatagtttccgtctgtatggtctatgtaataatcatcagccacactgcgcaccgcgtcaggagtatctgacaccgcaaaagtattcttaacgcagagccgaagagttgatggagtaaccgttttagtatttccgtctataggagcgttagggttttgcctgtcgcgcttgctgtaagccaaaaactgccaccaaattatctcagacatctttttagtccatttaccaggatccaatacaattttgccgccgttctctccctcaaaatctgttgtataacacgcgccgaacctacaaagataatcactaagagaatttctctgctcattgcttaatgaatgcgttatatcagtataatcttctgtcgcctcatcagcaaatgccggtacctgaaccgtcacacaagagaagacaactgcagtcagtatcagataatatataaattttctaatcatgtttttattccctcatcctagaatactttattacaaaacataaaaaactaattacaccaaatatttataacgcatagttttttaatcaactgttataaattaaaatcttcttacacaaaacaaaaataattattgtgcaattataaaaacactattgcttttactgcattaaaaaatatatttttacaagagtatatccctatatttaaaaaattaatatggtacattaatcttaaaaacaaaaagagtatacagcactaggataattataccacattttttataaaattcaacaacagtttaattttttgtataagttttcagaaacaatatttttctaaattcgaacttatacgtttttataaacttttaaggcccctcaatatccaccgtggtattctcaaagttaaaaatttaagctttcattaattagaatcatgagcggcttaaaattatttacaaaaaccgtttaaagtcaataccagaattcatacagaccctaaaatgagaaactgaccttcctaaataatttactaagtataactttttatgactttaagcaaccggtcacgtataattaccttttttatctacttatttctgttgtcagttaacggatctaagaatatctaatctgtccagccagtttatattctcctaactggtttttgatgtagtcaaatattaacttctatcacttcatactgtatctacataatattctatacatctaacatgtctactaacatatttgtaatttaaattttcatgttcatataatatcactaatgagctctttttcctttagatattacataaactatatcatagtcaaatttgtgaatgttcatcagcatataaaaatgattggaatatgtctatgcttctatgtttctatgtttctatgtttctatgcttctatgtttctatgcttgctaaaccttcttcaacgttccgcctgtaaccttctttaacttaccatagatttatttggagctattttttagcacaatgctattaaatatttgcatctattttttaaaatgaactatggttttaacttctatcaattttttcttttttattttgaactttcttaatactctttcattgtgtttttttatatctttactgattatgctattgtgaatttctagtttttgccaaaacttttatccacatataactaacggaattccaacgctttaaagcgctaaacaaaaatatccggcggaataccgccggatataagtttaaacaaattttataaatacatcaatattcaataatcttattcagctgtatttgatgtacgaactcttgaaagcaacgctgctgattccgcccttgtagcagtcgcctgtggtctgaacattccactgtcgtcacctgtaagataacctgcctctgtcaaacctgttacatatcctaaagcataatccgcaatggtatctgcatcagtatattcagaagcagtttcagatataagattgagctttcttcctatgattgttgccatttgttcacgtgtaactgtttcatccggtgagaatgttgtttcgcttgtacctgttactatacctgcctcagcagccgcagcaacatattcagcataccattcatctgccggaacatctgtaaacgctgattcagtactcgaagactctatttcaaataacgaaactgccattttagtaaattcagcacgtgtaacattattctcaggataaaaattgccgtctttatccccatttactatattattagcatacaaatccataatatagctgtaagcccagtagccttcggttacatccccaaatatctgacctgaaggtgacgctgtaggagcaacagttacttcaggtgttgaagtaggcacaggactttctgatactgccggagttgctgttggagtcgatgttggatcagtactattatttgtatttcctgatggtttagatgttggcttagcagttggagcctctgttggctctgccgttggattaggcgttggcacaatatcgcttactacgctaatttgaattgttggaagagacgcttcaagattgttcagttcactatctacaccattaaatttttcaatctttattgtttgtgttccatattcatccttgtcttttactctaaaaaagatttttgcaacagtattagaggtgttttctccttctgcataaacagtggttcctaatgttccaaaaacaaaatgtcttgtagtttcattatagcccgataattcttcccaatcgcttgaattgttaccaagttcgtctatgcttgtataaaaatttacatcactatattcaaatatatttgaattaaatgataagtcaaatccaattattcccgaatgaaacgactcatttgatgataaattaacgtccacctcaaacgtatctccgggctgtacagtatctgtcgatgatatcatatttatagttatagatttatcagaattgtcagcaaatacgggaataacaactaaattaaaaatcataactatagaaacaaatatagataattttttcatgcttctcataagtggttctcctctcgcagttaaattaattgtatatagcaaaatagcaaaattttaaaaaggagacccgaggttcgggtctcccttatagctaacttaacctcaaattacttagaaggtgttgcagtagcttccggtgctgctgttgctgtagccactggctcagcactggcagtagcttccggctctgcgctagcagttgcttccggagcagctgttttctctggtgctgctgtctcttcaggagttgacattgttgcctttactcttgaaagaagtgcagcggcttcagaacgtgctgctgaagcagccggtctaaatgtaccgtcttcttcaccggttaacagacccttttctgttaaaccagatacatacggaactgcataatctgaaatagctgcagaatctgtatacttcatagctgctttagatgttatatcaagataacgtccgattattgctgccatctgctcacgtgttacatcatcattcggagcaaactctgtttcagatatacctgtaacgattccagcttctgttgctgctactacatacttagcgtaccattcatttgcaggaacatcagtgaactgagattcagttgatttagaatcaagtccgaagagtacaactgccatcttagtaaattcagcacgtgttacattgttctcaggatagaacattgtagcagaagcaccgtttacgatacctgcatcatagagatccatgatgtagctgtaagcccagtatgttgacggaacatcttcaaatacctgcttacctggctctgttgtaggtgttggagcctttgtcggagccggtgttgctgtagctttacctgtattgcctgtgtctggaccgctaggaccgctgcttgagcccttcttagatgtcttagcaaactcatatgttacaactgctgtcttaccatcagcgctaactgtgatactgtcagcatcataagaatttactgttgcaactgcatctgcgctaattgtgcagttttcatcagctgtagcggtaaatgtaattgtataaactgtattataagcatatcttgactctacagccggattccaagaaacgtcgctaagtttataacgtgcgccttcaggtgcagtgatatcataagataccgctctatttgaagccggggcagttatagaaccagcaattgttgttatagtagccggatcagcagaaggtgtcggcactgaacctccgaatactacatcaactgaagcattctgctcaggcattacaaacttactgtctgatactggaatatctgtaccgtctgcagctttaacagttactactgctgttgcaccagcgatattagatactgcattaattgttactgtatcaccggcaggaatgatgtactgagcgcctgctgtatcagcagcaacacttgcagcttttactgctggtgtgtaaactaatttagctaaagcgacattgccgtcacaagaaatcttaacttcgctgtttgcaactacaggtacagtctgaacaacaaacttcttatctgtaccaatagtttccacgatagtcttctcgctaccttgttcaactattaagttacgaatatcagtattaggtttatcaggactaccatgttttacatatactgttatagcaccatctgctgacggtgtgtaagttaagtatctagccgcagcagtagtcttaccgccaaacttaagagcgccagttacagtctcagttgtgccattctctaaagtaaattctgtgtcagtttttctatcaacttcaaatgcatccttatactctatcttattctcatcaattgttccatttgaataggacattagactattgcctaaatccacattacctacataccactctttttcagcgccacctttattaacaagctttgttcctgcaggagcatcagcgaatgtccattctactgatttaccaggaacaggtgcttctgtaacaattggtttttctgtcggaacaggtgcatctgtaactactggtttgtcagtaacaaccggtgcgtctgtaacgataggtgcatctgttggaacaggagcttctgttgccggggcaactgtcggataaacctctccgcttgcatttgtaagagtacctgtaccatttgttacattcaaagtagcaatatagttttcaaccggtgcagttgtagctgttggaacaggaacagctgtagctgttggaactactgctccgccaatagtaacacttgtagaattcattgttgccccaaccttatccaagttagcgtcaacaccattgaatgttgtcaaattaatagcctgagcgccgtcaggtgcattatctttaaccttcaaagtaacaacagctatcggctgatgttttgcatggtcagctgtatatacagttgttccaagcgttccaaatacaaaatgatttgttgaagcattaaagcctgagtttgcttcccaatctgatgtttggttacccaaatcatcttcataataagcaaatttaacaccttgatattcaaatacatttgtatcaaatactaaatcaaatccgattatacctgatttaaatgcctttgcagaagtcatatcaactgtcatatcaactgttccaccttgtgcaacattttctgcagatggtgtaacatcaatcttaacagtctgtgccggtgctttacctatctcaacttttgcagaatttaaagtgcttgaaaccaaatccaagttactgtcagctccgttaaaagtctcaatagatatattctgaactccgtctttagcagtatcttttacttttaaagtaactttagccagtgactgacgttttgcattgtcagctgtgtatactgttgtgccgagagttccaaacacaaatttatttgttgaagtattaaaacctgagtttgcttcccaatctgatgccttattaccaagatcatcatcatagtatgtaaactcaacattttgatattcaaatacatctgtatcgaataccaaattaaatccgattatacctgatttaaatgcctttgcagttgtcaaatcaacagtgacatctacagttccgccttgttctacaaactctgcagatggtgttgcgcttacaactactgaattatcatattctgcagcgaaaactgaaccaaatgacataaggctgagaaccatggctaccacaacagtaattgctgtgatctttcgtaaatttctcattaattaaaactccttccatgaaaataacatatttcaagtagtattgtataactgactctcgacagattgccgggagtcagttattaaataaatttctcttattgttctacggggaaatttgtgatttttccagcagcgtattgcattataaggattgcatcccctgcattgataccatcggtaccactaacatcagcagcagtcttctgatcatcgctgagctctgttttaccagctgcatactgcataacaagtattgcgtcacctgcattaatatcagtatccatatttacatcaccatacacaactccaggagctgtttttaatgaatatgacttagcgtcaggtgttgaaacaccggttcctccgatttttacaataataattgaatcatcattgtagtcagtctgtgacagcttaaatgaatatgtaccagaagcctgaccgtcatactggttgatataacctacaggtgttgtagatgtaaaaccaactgtattgttctgatcgcctgtgatacttgtgatatcatatacaaagaatgtcatctgacttggtacctctgtaccggaagcaattgtaaacggaacgtttacattatagtatccgttagcatcgtcttttgaagctgaaattttacctatctcaactactgaaccagtgtcaacgtcatcaatcttagattcaagattaacatcgccttctgtaaccggcgctgtgtcaagcggtatgtttacttcttctgaatctacaggagcttctgtaggaacaggagcatctgtatcctcagcaggagccttaacgtcttcttcaggtgcttccacatcttcaggcatagctgtaggctttggagcttcaactgtatctgtaacagatgcgtctgcattattgtcaacaacatctccctcagcgaaagctaaactagctgttgctgaaaacatcattaatgcagctgtaagagctgcgccaaacttaaaaattctcttcttcatttaattttcctcctaattttgtttgtttataaaatcgtcgatttcttcccaattaaatctgcaattttaaactacaatctcaaaattcgaggttatcctcctttccccaaaaatgtgtaagaaatgcggatcacagaacataacctttaagtcttaggcaaacacccaaaacaaccggaaatgtgcatccggctaataggttcaaactgataaataacgcattttatttatttttcactattatgatacgttagtattatacaacgaatgttcaaaaaaatcaacccctttttaaaaaataataaaagtttttctgaaaatacaaaagtaattgactttttatgtaaatcgtatataattgtgcttatgaagaatacaaagaaacataaaataataaaatacatgacatatatattgttaatagttatcataataactatgttttcaggctgctcggcccagtatcaaaccatatctgacacccaatttatattagataccgtatgtaccataaccgccggcggtgtgaaaaatacaaaagaattgatttcaggcgcctttgatgtcgtatataaaattcaaagcaatataagctattatgattccggctctaccgtctccatatttaacagttcgcctgctggtgttcctgcagcgcttgatccggacacatatactattgtagaaaaggctcttgaagtttccaaagcttcgaacggagcctttgatataacaattgctccggttgaggaactatgggatttcaaatcagaaagtccggttcctcctgaacagaatttgataaatgaaaatttaaaatatgtcgggtataacaacttgatacttgattctgaaaacaaaactcttactaaaaccattgacggtgtaaaaattgatttgggcggatgcggcaaaggttacgcttgtcaaaaagctttggaatatatagaagaaaactatcccgattcatacgctatactggattttggcggtaacgtaagcgtttacggtcaaaatcccaaaaaaataaacggaagttttacggttggaatccaggaaccttttgcggcaaacggaacttattctgaaatggttgatataacttccggggagagtatagttacaagcggcacatatcaaaggcacttttattataacaacaaaaactatcatcatattctcgacccatcgaccggaacgccttctgacagcggttttgacagtgtcagtgttatttcttcatcatcacttgaagcggactgtttgtctaccgcctgtctggttctcggagaaactgacggcacgaagcttgcaaataaatttaacgcaaaaacgtattggataaaacaaaggagcaattaatattaatgaaaataattaaaaatgccaacctaataaccatgagtgaaaaatatggcaatatagaaaacggatatgttaaaattcaagaccataaaattatagaagttggaaaaatgtctgacttttcagatagcaatattgatgccgagataattgaagccgaggggagaattacaactcccggtttggttgacgcacactcacacctgggaatgtgggaggacggtttggattttgagggtgatgacgggaacgaagataccgatccctgtactcctcagctccgggcgatagacgctataaatccaatggaggcgtcttttagagaagcttttgcttccggtataacgactgttataaccggcccgggaagcgctaatcctatcggcggacagctggcggcaatcaaaacatacgggaagcgtatagatgatatgataataaaagctcctgttgggataaaaattgcttttggtgaaaacccaaaggctacctataacgacaagagccagtcgcccagtaccagaatggcaacagcagcattgataagggagacgtttaaaaaagctcaggaataccaaaggcaggttgagcagtaccaaaataactctgatgaggaagaccctcccgaatatgacataaagtcagaatcgctgttaccgcttttaaatggtgatatacccctgcatgcgcatgtgcacagagcggatgatatattcacggccgttcgaattgccagagaatttaatcttaatttgatattggtacactgcacagaagggcatttaatagctgagcagctggcagatgatggttacccggttctgctgggcccaatactcactgaccgaagtaagccggaactgaaaaatcaaagtgaaataactcctgccgtattatcagaggctggactgaaaatctcaataataactgatcaccccgaaacgcctgaaaagtatttaaccctatgcgcggctatggctgtcaagcatgggcttagaagggatgaagcattaagggcaataactataaatccagctgtttcctgcgggattggagacagagttggttctatagatgacggaaaggattcggatattgttatatgggacggtgatccgctcgacataatgggcagtccgtatgggatagttatataaaacatgccgttttatcgcaataatataggttttgctccgcatataatttttgcggagcttttttattttgtttataataacacatattatgatgataaatttttatctatatttaatattttattttaagaactaagtgttatttttttatttatgcctaaacgattttaaatactctgtaatatatttgatttatagaaaataatattacaaaatctaaggctgcggacaatattatccgcagcctttaagcataattttatcatttatcagttcttaaatagtcgtttatttcattgacaaaaagttccccatacctttgaagcttcgcgcttcctacacctgatactgtctcgaactcatccaaagtctttggaagtatcctgcacatatcacggagcgatgcatctgaaaatataacataagccggaacgctgcctcgctcagccagctcttttctgagatccctcagctttgagaacagaccctcgttaactgtttcagcctgcaccggcttcttcttagcctttttctccttcggtgctttcatcgaaagccgatctccgccaaataatatgctttttgacttctcagtcggtactaaaatattaaaattatcctcgtcttttattatataaccgctctgaaccaaaaattcaattatattcataactctggtcttggtcataccggacattattccatacgtagttaactcgtctaaatgcctggaaataacattatcgttttttgaaccgcacaaaacatcagccaccatgtttttgccgaaagcgcgtccttgacgttttatcctatatatacagcttagaatcttctgcgcttcctcggttatatccactgtttcaaacctagtgttgcagtttgagcagctgtcacagcatatcggcgctgtctcaccgaaatactttaaaataaaacctctgagacaatcatatgtagtgcaataaaacgtcatatgcttcagcagttctaaatccttttttataacctgccggcgcatttcctctgtcatttctaaattttcgtttccgttttctatcagaaacttattgattctgacgtctttcggggcgtaaagcaatacgcactcagccggttcgccgtctcttcctgcccttccggcttcctggtaataactttcaatattcttcggcatattatagtgaacaacatatgaaacgttggacttgtctattcccataccgaacgcattagtggcaaccataactgtttttctgtcatatataaagtcgtcctgatttatgcgcctttcctcatcatccaaacctgcgtgatacctggtagccgcaaaacctctggagatcagttcgtcacatacttcctcaacgccttttctgcttatgcaataaactattccgcttttttccttattctgcggacggttgagtatatccaccaaagcattaagcttatactttggattctgaacctcaaaatataaattttttctgtcaaatccggtaaccatcctaaacgggttatcgagttttagaatattgcagatatccacgcttacccttttagtagccgtcgccgtaaaagcggaaaccacaggcctatacgacaaagtatcgataaactctgaaatttttaaataacttggtctgaaatcctgaccccactgggacacgcaatgagcctcgtcgacggttaccatagatatttttgagttttctgcaaaatccaaaaaatcatcagtcacaagccgctcgggggcaacataaattattttatactgcatctccgccgctctcttaaacacctcacacagctggcggtaacttaaagagctattaatatatgcagaaggtatacccgattccgtaagagaccttacctggtctttcataagggatataagcggagaaataacaatggttattccgtccatcaacatagccggaacctgataacaaaccgattttcccgctcctgtcggcattattcccagcacatcttttccggacagtatattgtcaataatatcttcctgtccgctcctgaacttctcatgtccaaaatattgttttaaaacttcaagttttgtcatatctttctccgccgttattttatactttcgataaactcagccaaaattccctcttttaatccggcagaggatactatcacttcctcagagcctattttgtttataagctccacaatcggcagcactccggcaattatagtgtctgttctagaagcttctatcccggcgtcgcctctttcagtttcattcatttcaaggatattgccgaacgcatcagcgacgcagtcgcctgccattacacagccgtgaagctggcttctgtctgctcccggaacattattttcaactatcgcaagattatatatgctgccgcccattccaactatcggaagctgataagcgtcctccagccagtgtattttgtcaagctggctgtcaatataatcagtcagcgcactaagcgcctcctcagtttctcctctaaacaaaaactgttcagtcatgtttacggctccgacaggtatacttgttcttgccagcggctctccgtcatttaccaatattatctcggtgcttccgccgcctgtgtctactattacacagtcctctatatcaagcgaactggtcacgccaagaaaatcatattcggcctcctgctcgccttttatcactctcacgattattccggtctcatcctcaacctgttttatgaactcctggctgttgcccgctttcctgactgctgctgtcgccacagtgataacgtcatcagtattattttctttcataatttttttgaactcactaagcgccgcgatagtcctgtctatagcttcgggctggagattcccgtccatgttcataccctcgctcagccgcgccatatcacggcacctctctatatatctatgagatccggttttttcatcaatttcaactatatccattctgatagaattggagcccaaatctattatcgctaaaaccatttttatccgccttcctatgccaatatcaaattcaatagctatcttgtccatcacaaaaatttcagcggcggcttatgccgcagctgaaatattaaacattcgccgccggctagacacccggcagacattatatcattattctaacacaagtgtaaggaataatacttcttcctctcctctatactcaacagttccctgtccgcaaatattgttaacatatgcttcctccgcattctcggctgttttaacagaatgcggaccgcttgttaaagttaattttattattccatcttcattggatgtaaactctccaaaagcttctccgtctacataaaccgtaacggtcttatcagtcaaaaggtttccgtttatatctttaagatataggctggcggtataatccttagccgtatatccgctcatttcaactatacgcccttctgtgttgtctacctcaagcggttttactccattatcagtaagcttcaatatataatcgcagactatctgctcaacatcggttccctgcattatctcaggcaggccaggcaccatatcataatcgtttccgcccattgccacaaaatcatttgttgcaagcagaatcttcgtttcgaaatcagtcctgtcaagcggttctgtttgaccgcctaatgttacagaaataaccttttcgccctctttgcctgacgggtcatactttacgctcattccgcctatctgcaaaaaacctccgtctggataaaggtcaagcagtcccgtctcctcgtcctgggcggttgcatttttaacgcttctctccataactgaatataaaatgtttggcgttatttccttaacaaacagcgtgtttccgaaaggcagaacattaaatatactgccaaccgttatatcgccgttcttaacagaagcgcgaacccctccgccattttgaacgctgacaatcggcaggccgctgtattcggcgcttatattatttttaacctcgtctatcattgcgtcgcatataagatttcccaaatttgtctcaaccgcacgcggcacagcaaaattatttacataaccgccccagagagtggtctttgtctcggcaattttattgtcaagcagtttcgactgctcagccgttaccttttctaaatattcagtaacctcagggtcaggagtgacttttgctttaacctcagcactgctgagcatattttctttaactcctattacctctccgtcctttaccgaaactgacataatacctatgttctctgaatatgagcctgtctgagcaattaatacgccgttttcagtattattatacacagtatggctgtgaccgtctatgaccgcgtcaagacctgacgtatccaaaagcccgtctacaatagccggagtagtgacggatgacgcttgagaaacaccgacatggaacaagcctataaccacatctgctccctggttttgaagctcctcaacctgtctttttgcggtctctgtctcatcttcaaaagaaatgcccaagatgcccgatggttttgttgaagacgctgtatctgacgttaatatgccaaaaaatccgactttcactccgtctatttctataattgtattttctccattattctcttttgttccatcggcataactgcctttaaaaaacggatgaccgtcttttagggtgttcgccgatataatcgggaaatcagcggctgccgcatttttctttgctgtctcctgtccgtagtcaaactcatggtttccgcacgccatcacatcataaccggctaaattcatagcctcaatggcgctcgcccccttatccagcgagacaaaagctattccctgagtagcgtcccctgcgtctgccaaaacagcattatccgtctgcttcttcagagcagatatttcatccattccaatcacagatttatcgcccacgtcatagccgtgaatatcatttgtatgaataatatttatggtcaaagaatccgcattcaggtattccgccaaacgcatagccacagcggcaagctcagagcgggtcatatatcccgacgggtcaaaggtttggttctccttgcccgacataatattgttcaccgagcaccaagctactgctgtataacactcagaagaaatattctccgcgtcagaataggctactgcaatatcctcagtattagcagaacctccggccgcatacacaagaaccgccatatcctccctttcaaccggctcagaccatatataactgtcaaagtcaacagagggcactaacctctgcagcacagtttttgccataacatcactgacaattccgtccggctggaattctgattcattcacaccattcatcaagccgttttgtatacaatactcaatgtacggataagcccagctgtccccgctcaaatcttcaaattgtgtatccgctgcaaaaacagaaactcctgccgccgcaaataccattataacggctgtcaaagcacacaacacacgctttaaacttctaaattgattattgttcatgaaaactcctccaatatatttatttaaaatcaaactctttatttaatctcccaaaaccgcgtcttttagaatctgcagacggtttggcacaccaaactcaggctgtatagtcatcgttacaaatctttcaagagttctggagcctgatgacaaaatcgccttcgcctgaatcgtctttgcatcctcaaagaatgccggagggtttatttgaccggaatttgttattacactctttctgaatcccagtatatttcccaatgaataattatcattaaaatcccactttattgttactctctctccgttttcagctatatagctgctcggcaaatcgctcgtgacattatcaaatgaactgttgtttccctttaactccataatagcctcacgaattgcagtcatatttttatcgtctgttacagatactgaaaggcttggggcaaactcatgagagtatgacgaatagagttccagactgtctgttgaagccgggtcggtttgtgttccgtctatcaaaaagctggcagtatatttgcctgatttgaccagcttataaactaaatccgttacatccacgctgaaaccccctgaaacttcaagtccgttataggacttaatcagggacagttcaccttccggacggttattgtaagataattctccactgttccagccgtcattttccaaataatatatatcgatttttgtattcacagatttaccgataggcctgagaaaaatccgcgcgtcctcaacagcgccgagaatatttttaggttcgatattaaattttaagtatacggccgaaccattgtcaaccgcaagccttccgttatttttataaagcagctcgtttgagtttgtatttggttccgcctttgatacataaccgttggtatccaaataacttttgtttaacgtcttggtatcagtatccacagcgtcacccaccaatatttttaaatacggccggtatgacgggtcagagtatcttgttgaggctatttgaaccggcgcagtattgctcacgctcggactaagctttaacgtaaaaactttttcatcattgccaacagcctttcttataaactctgacaaatcaatttcaagtatgctgtccgaaccattgcccgcagctgtgcaaagatattgttcctcaccgcccggtttggttgaccaggtcatgttatctccccagttattattatcaaggtagctgacgttaaacgaacagtctgtttcatccggttcatttctcccgtcccaggttaccgcaagtctcagttttgcttgacttatatcgctcttttttgcgtttccgattgccgacaagtcgaaccggaaataagtgttccagtaattaccgaccagcaggttatcctcatccagtctggatttgttcttatttttggcgtcactgtatacaaaggtctcagcgcccggcgaaattttaaccactcgtccctcagcaactaccggcgttgtaaagtagagaaggccgacaggaactatacccaaaaccaataaaacagccagggcacagccgataatctttctgatgattccaacctgcaacagttccaccgtcctttcagacagatatttactaaattatagcataaataagttcattgggcaagtacaatacaggctttgattttaaaaatataatataatctgcagcatgtataaaaaggtcggtttgtgatatttttgtaggtttgtcaatgatgtgttacaaaaaagattaaaagagttcaccgaaattgataaaagagttgatgtagtcaattggagctttccaattaatgcgccgccgtaatcccaatgctggacttgttgtgttttgggttaagcttcgtcaaagaggctatactcgttctattacaggtctttaccgcatattccgcaaacagggacaaatgcctgttaaaccacccaatcccaaatacataccaaagccttacgagcaaatgctctatcccggtcagagagtacagacgtttgcacatcacaactaagtttgattgttgacattgtaggtttattaatacaaagtgatttgtatcacacacactttaaaaaagtgtggtcatagccctccgaagcttgctaaatcacattttttataagaaatttttaggaattaatatcttcaaaacagtattttttggttaacatcggtagggtgtgcgtaagcacaccgcgttaggtgagcaaccatctcacacgaagcgtgtgcgagtttcttaccttgtgcaattgtcgtaataagtacatctaaatgtatctttattaccgctttttcactatttatttttcaaacatctgcttagctctcaaacaaatctctttgtcagaaaacttcatcgctgcaccgcagcaactttattagtataccatgtttgtttttacttgtcaagaccctgtcaccttgctcgtcagaacgcttccatacgcattatacgtatttactgtttcatttccatttttgtccgtttgtttggtcggcagtcccatcaggttatattcacttattatatcttgttacgcataaaaaactgaaacagagttatatgtatttcttaactacttaaaaaggaagtatttaatggatttttattttaaatagttaattatttttatatattcaaaaactttccggtgttttttactccgtttcaattttttatgcgtactcttgtccaacttttttgttttaccggagggcgtaaatgatttacgccctcaaaatttactatatgggaaacaagctgaacaccaaaacaccgaaagccaaaagcgaaggaaaaggttatacatacagaacagagtacggaaccaaagacggcggaacgtatgtgacaacaacggatatagacaataattctaccagagtggaaaagaacatgctgggtcaggaagtaaagacaatagatccaaagaaaaatgagagttcggcaaagtatgacgacttattgacaagaagggtaagaatatgataagataataaagctttcggctgaggcaagaaaagctgaaagatagaatactgtgagagtaaaaaaggaaccggagaagacaaaaaggccggttaaaacttagagagataaaagaacagaaaaaaataaaaaagttcaaaaaaagtcttgacaagtaaaaacaaacatggtatactaataaagttgctgcggtgcagcgatgaagttttctgacaaagagatttgtttgagagctaagctgtatgtgatattatggtgatataactataacacaatttatgagttttccgtattctttttttctctttgtaacacatctattgtaatcctacaagctcaaaaataaaaagaaaattttttcttgacatagcctatttattttgttataataaataagctatgcgggtatggcggaattggcagacgcgctagatttaggttctagtgtcagcagacgtgaaggttcaagtccttttacccgcaccaaaaaaacggcaagacttaatgagtcttgccgtttttattttctttatgatattacttcaaaatgtatctgcgggacttcaccatgaacatcgataaacacttccagcactttatccatatagttctgcaaatctttaggcattgtttcaatccctgttatctttacagctatcggtgggcactctgcgtaatctcttaaaagatcacacaatgcatccaattcctttcaaaccagtcaggaaagccaaagctttcctgaattatatcatataattttataatatacttacccctgtaaaatcaaatattatttcctgcatatctagctctgttggcattcccgcctttattgcatataagtaatgataataagatatgtcacccataatgtgttaatggaattttatgctgtatcatttgtatgcaatactatttttataatatccgcactgtaattaaaggcaatctccatgtataacattgtcaacctgaatcaagtctattcttgtgaaatgataatacatatatttggttagagtaaaattttttgtgtctgacataagaatgtagtaaatatctgaatcaatagaaaccttaagatattttgtatttcttattagaacatctgattcaagaatagtaactattacattagaatcactttttgtgtgctcaaaattacccaatagttccattttacaatcatataccttcccttcctcaataaaatcgaaattattataacttacaacagcagaatcatcaaaacataaatttattgtatttgtattaaggttttgtagttcaatatctcgagtagctgcataattgcgaattttaattattttatacacatatttttcctcctattttttaattggttaaaatgaggcgattgtttaaaggataaaatattatgaacaaatcttatagttaataggttttttataaaaagaaattatgaataatagtaagtaaaattaatttatgcatatttttaacagaactcagaactccaatatttaattggagttctgtcccagtttttaatatcttttaaatgtaattttaatatttccattatcagactttgtccactttgcgaaaacgtaagagtttgcaaagtcaatatctaatgttccttttttgcgtgctgatatgaatttctcactttcgtatggattaataagccatccgctcaaatcttctacatcccaaccagtgtccgaatctataaaactattaccttcacccgaatctattaaaaatagctttcctattttttcagcctcttgcataacaaaatctaaaaatgggtcgttatttaacataatttaagtatctcctttcttaattaaggccatattttttctgcatctattattcttgggatatttataccttattttattatggttataaagtttccgtttaaatctgttacaacaacatctttatcttgtatataaaaatatacttgtcctgaggcatttgccccatttggcaatgttttaccttgaccacgccataaaccttgtcgaatttcagttttatgtataaagatttcatttattctgtttctaattaaatatctgctttcaggattacttggatttaaaccaaagtcttcagcatgttctccaactttttttccaaattgagaatctgaaatttttatgttcttaccaggaatgttgaattgggatacgtaaggttcatgagcaaaagcattttgtggttcagcaacagctatgtctcccatcattgaacttgtgtatggcagattcataaatgcgttgtatgacgcatttaatcctttcattaggctgtcctcaaactcagcttctgtttttgcaaacaccgtatttaagtaatgatacagaggtatattttcaaataattcgtcaatggaatcttctgctgtatcatttgtgtccgggttattttctgcctcataataatcaatgagcttgttgttcatttcttctgccaaagtgtaccttgaacttacttgcggcagtgtttcttccgcttatgcatttcttcaataaaatgcgatacggcagattttcttgctttgtctcccaactcatcatagttggaaaacattgcgtaagcaagagctatacccttttcaacatagtcattttctgccttcatagaatatggcgctgacgatagtgtcagcattttctcgaatatctcagaagtatcaaacaagtcattctgtgattcaaaagaaaaatcagtgtatttctcaagcatagagaaaattgcagataaatcaatggtcagacttcctcctgcagctataatttccgcacaccgccagccatattttgcgttagggtctttgattggacgcccgcagcagtcacagcgattattactcaatctttttcactttctttcattataacattttttattatattttcaattcaaacaataactgttgaactgataataatatgttaaaatatgttaaacaaaagaagtgtcttaaagtgccattattttaacggacgtgtagttttgatgtaagaatgggggttaaatggaattttgaattacagaatatattaacctgtttttattgtatttgtttgttgtatgagtgtttccaaataatacttgaatgtggttagaatttaccagataaatatgtattttataaaatgttaataatatacggtttgtcattgtttctatttagtaattttaattaattattcgtcttaattccaaccaacttcataacccaagttttcagatataaaccggattggcagcattgttcggtcatttattgtagcgggcgcggtatcaagagtttttgcttcctcatttacaaatgcagttgtgctgtctattgtaagtattattatatctttgccgagagcgattaaaacattctgcgtatcttattcccaggctatagctctgcccatttcttctattaacgcacgtatcggtaccaatattctttcgttgattataaccggcgtagtgctgcgtccgggatcaatttctttttttacatcgtttactgtcattacaggttcaccaattttcattgtaagagtaaaaccggaagcggaaacattttgaggctctgccgcgctgcatgatgtcatacatagtgttgaaattataaatgttaaaattattaatgttatctttttcatttctatacctcttaactatattataatagatttttatatatcgtatgctgaaatcgtgattatcccggacaacttttcaatgtcatcctgtcctgaaacagattcaccgagctcaaacaaactgctgttttcgctgaagctgtcataaaacatcactacatcgccccatggttcaaaatatgccagcttgcctttgccgccgattgccattggcgtatctgtgatacttagtttctgaggcggatagaacactttatcgttgatgctgaaatcttcaacctcaattgtaagcggaagctgggcataaagttcttttgcggcttgactttcattgattttataaataatttcataatcgcccgaagatattttaatctgcatctcttaattttattattttctatctgcttagctgaatacagcagatttatttctttcatatcccataaaaacgcttttattaaatctgcgtcagatgatttatctgaaatatttttcgttattgtgccgttgccttcagtaaaatcaacattaatcaatacgttatctttatagaatgctaaaatcaatgttgaattgtcaggagtgttttttaccgttacaatatcattttctatggttacttccggaactgccgcaggagctgaagaaggcgccggtgtctgaactgtttcagtttttggccaatctattgtatccagccagttcttaatgcttgcttctgaatcactgccggataaacgcctgccttcaatccacgacgtattttcagcaagcgtgtgtaattcgctttcactttcgcttatgctgcttccgcccgatgtgcagaatggattaattgttttgtctgaaaaattgtagctttctagaaacgtgtatattatttttggcgcttttacatgccatatcggataaccgagaaatatagcgtcatatttatccaagtttttaatgtttcccgaaatagatggtcttgcattgctgtcgctctgctctatatttgctcttgaagaaatattgttgtagtttaggtcttccgatgaatatggctctgacggttcaatctcataaatatcagcgcccagtaaagaatcttccgcttatttttgccaatcagactttttgggtcaccaggatcttgagtggtttggagctgattattcatcaatgaatattgttgcaacatataattttatttataacgcaacatttatggttgaaaaaggtatatgctatgcgctttgcctcgcaaatcttgtaaacacggaaggaagcaggaatctgacatttcgtccgattattcctgaaatgtcaattgatttgtatattgtaacaaagaaatatgagacgttttctccggcggtaaaactttttattaataaggtaaaagagtataagttttaaaaataatattcagcaggctttagaggttgttttaattttataataattttgaataaaaatggtgcacaaatttttgtgcaccatagctttatacggtttttaaatataaatatttgagcggataaaaacaattctgtattttttaaaattttaaattatcatcttagacttttctcaaatatccaaatgtttaactcaatatttttttatttcctgtaatataaaatatatttaatgaaaaatgtaaaaaagttaggtaaaacacgtttttttattattccagcaattaatagaatgcttactttggattcagcagtaaggctcattgaatgttgggtttagattaataaatgcactcaaataatttataacttatctgagtagaaatctgcatatttgtgtaagtcatatgccgtatgaatatgttttgaacaattatggagtttcatttgtatatcaacagggagcgacaaaaaatatgacctgctgctggaacttaaattaataagctgatttagattttcatacatagcattcacctcaaagatagtttttacatatataaaaatcaatattcttatagagtcgattgacagattataaaaattaaatcagctaaaaactatattatatgttgtgatataagtcagaacgactgaacaattaaatataatgctggacatgttctgtttgttgagatgtaatgtataactgcactgtaaattaaacaggtaaatattataaataggtctatagatttttatgcttggaacaataatcaatatcttctcataaaatgtaaatagttaaaatttaattttttggaggtttaaatatgacggaccgaaaattaagcaatgttgctaaagcgtatttgtgtcgtttttacgagatattagaacaaatgactgagaatatgacagaggcggagttgacggatagcctttctcataattttattgttcaaatgattcctcatcatatggcggcaatagaaatgtctgaaaatctcttgcagtataccacctgcgttccgcttcagaatatagcgttaaatattatagatgaacaaacaaagagtattgataacatgaaaaacatactttgccaatgcggagaacaagataatacgcccttagatttgtgtttgtatcaagaaggctttagtcagataacctgtactatgtttactcagatgaaaaatgcttgctcaacaaataatatcaatgctgactttattcgtgagatgattccgcaccatgagggagcaatccgcatgtctcagaacgcgttgctttatgatatttgttcagaactcgttccgatacttgaagcaattattaaatctcagaaaaaaggtatttgtgaaatgaaaaaattgcttcggtcagtttgagtttgaaatatgcagaaagttttactgatattaatttaaaatctttgttattttcaagttgtccgctcaaatataataggaagtaaaaagaaatttaaaaatttatggcgataaaaatttataacatttacataaacaggagattttagcagataaatatttttttgaaaaaatttgtcctttttgttgacttgttgatgaattttgtatattatataagttaagaaatttttgttctctatagttttgaaattaactaataagcaaatctataaagagcaaaaagcgctttgatttatcgcgctccataacgaactgaaaaatcttctatttgctaaagtaaaagtaactgtttccagcgtatttttgctgtacagagtttttgcggcagccggtttttcggaaaatataataaaagaggagagaaataagatgaaaaaaagagacgatattcataaggtactgataataggttccgggcctattattatcggacaagcctgcgaatttgactattcgggaactcaggcgtgcaaggctttgaaaaatttgggttatgaaatagttttggtaaactcaaacccggcgacaataatgaccgatccgaccacggccgatgtcacttatatagaacctcttaatttggagcgtattacacagataatagaaaaggagcgtccggatgctttgctgcctaaccttggcggtcagtcaggactgaatttgtgttctgaacttgcggaagccggagtgcttgaaaagtataatgttgaggttatcggcgttcaggttgacgcgatagagcgcggtgaagacagaatagagtttaaaaagacaatggactcgctgggtatagaaatggctaaaagcgctgttgcttatacagttgacgaagcgttagctatagctgaggagttaggatatcctgttgttatacgtccggcttatactatgggaggagccggaggcggtcttgtttataatgttgacgagttaaagactgttgtgtcaagaggtcttcaggcctcattggtaggacaggttttggttgaggagtctattctcggctgggaagagcttgaacttgaggtagtccgcgattctgaaaacaatatgataaccgtatgtttcatagaaaatattgaccctctgggcgtgcatacaggggattcgttctgttcggctccaatgcttactatatccgaagaggttcaaaagcggcttcaggagcaggcgtataaaattgtagaaactatcgaagttataggcggaacaaacgtgcagtttgctcatgaccctgtgagcgatagaattgttgttattgagattaatcccagaacgtcgcgttcttcagcattggcgtcaaaggctaccggtttcccgatagcgcttgtgtctgctatgcttgccacagggcttactcttaaagatataccgtgcggaaagtatggaactcttgataaatatgttcctgacggtgattatattgtaattaaatttgcacgctgggcttttgagaagtttaaggatgttgaggataagctcgggactcaaatgagagccgtaggcgaggttatgtctatcggaaagacatataaggaagctttccaaaaagctatcagaagtcttgagacaggccgttacggcttaggatttgccaatgattttcatgataagaccaaagaagagctgctccaaatgctcgcatatccaacaagcgagcgccagtttattatgtatgaagcgcttagaaagggagcaactgttgaagaactttggagtttaactaaaataaaacattactttattgaacagatgaaagagcttgttgatgaagaagaagcgctcttaaaggaaaagggacatttaccgtcctccgaaatgctgacaaaggctaaaaaggacggtttttcagataagtatttaagcaaaattttggaagtaccggaagatgaaataagaaatgaaagaataaaaatcggggttgaagaggcttgggataaaatacatgtgagcggaacgccggacagcgcatattattattcgacttataacagtgaaaataacaatgaagtaactgagaacaaaaaaataatgatactcggcggaggacctaacagaataggtcagggtatagaattcgattactgctgtgtacatgcggcgctcgcccttaaagagctgggctttgagactataatagtaaactgtaatcctgaaactgtttctacagactatgatacgtcggataagctatattttgagcctttaacattggaagacgttctcagcatatacaagaaagagaagccaataggagttatcgcgcagtttggaggacagaccccgcttaacttggcggcagagcttgagaaaaacggcgtaaaaatattaggaacatcacctgaagttattgatttagcggaagacagggacaggttcagaaatataatggacaagctggaaattcctatgccggaagcaggtatggctgtaaatgtggatgaagctttagaggtcgctgaaaaaatcgggtacccggtaatggtgagaccgtcttatgtgcttggcggacgcggtatggaggttgtgcatgattctgacagtttggttggttatatgaatgccgctgttggagttacgcctgacagacctatacttatcgacagattcttaaatcacgctatggagtgtgaagctgacgcaatttctgacggaaaacacgcctttgttccggctgttatggaacatattgagcttgcgggagtgcattcaggagattcagcctgcatacttccatctctaaatataccggaagaaaacgtgaagacgataaatgaatatacaaagaagatagccgaggaaatgggcgtagtcggactgatgaatatgcagtacgctattgaggacggaaaagtttatgtgctggaggcgaacccgagagcgtccagaactgttccgctggtatcaaaagtgtgcaatataaatatggtcaaaatagctactcagataatgacggcagaacttaccggaaagccgtatccgctggacgagcttaaacatggaaagttttcgcattatggtgttaaagaagcagtgttcccgtggaatatgttccaggagtgtgatcctttgttaggtcctgaaatgaggtctacaggagaggttttaggtcttgccggaacgtttggagaagctttctataagtctcaggaagcaactcaaacgagactgccgcttgaaggaagagtgtttataagcgttaacgataaggataaaaaagaggtagtttctgttgcccaggatttccatgacgcagggtttgaaattatcgcaaccggcggaacttataatctaataaaagaagccgggattcctgctgagcgcattaataaactccatgaaggaagaccgaacgtgctggatgaaataactaacggtaaaatacaaatgataattaatactccggcaggtcagacaagtatccatgatgacagttatatcagaaaggccgcaatcaaaggaaagatttcatatatgacaacaatggcagcggcaaaagcggcttcaagcggtataaaagaagtaaagaataaaaaagttatagaggttaaatcgcttcagcagcttcattcggaaataaaataagaagctaatcgctttatttgagttttctgtcaaattatagtgttgtattgagagaaaatcaaaatttaactttaaacgccttgccgcttattaaacggcaaggcgctttttatataaattgcaaagctgtgactcttaactgttcggtttatatgagtatattacgtcggataagcattaatacggactttattgacggtttagtctgtattaagcggattaaactaaataaattttatctaattcccgccgatattataaagctttgtgttgaaaacttctgaaataaaaataagtgataagcgaaaactatgattttctccgtgattaaaacttattacacaatagttgagagtcattataagatgaaatttcactattatataaataaaatattatataactggcttttatatttaatgtaaaacagaaatattcggctgattcataagctgcagttttttgtttttgatttttatatagctaaactaagtttaaaagtaatcaaataacaaattttgttgaattttataatttatgtatgtttatagatgttttataagtgatttgctataaaatattgactttgccaccaaaagatgttacaataactacaagttgtatatcttatttttctaaaataaaaaatatttatgggaggtatgagagaacatgagaaagttaagaagcggaatatcagcaatactagttattgctatgattatgaccacgcttggaatggccactgtcgtatcggctgctgagtaccaggatacacagggacactgggcggagagttatattaataagtggtcagataacggcgtaatacaaggcgacggcggatatttcagaccggacgatgcgattacccgtggtgaagttgcacaggtaacccagaatttaataggatacgtaaataaggcaacaaacacatttacggatgttgcggcaagcgactggtattcagatgcaatactcagattggttgaggcaggcgttctgacaggaaacggtgacggaacaatgtctccgaataattatatgacgcgtgaagaagctatgactatgctggctcgtgcgtttggacttcaggtgcagaactcaaatgccggaataactcaatatgcagactatcaaaatatttctgattttgcaaccggttatgttggcgttatgacatcatcaggttatataggcggttatgaagacggtacaatccgtcctaaagactatatatcaagagccgagtttgtaaagataatagacaatatgataaagctgtatataacagaggcaggaacatatggccctgagtatgtaggcggattgataattataaagaccggcggagtcactttgagcggtattgttgctaaaggtgttgtagtgtccggtcaggcaagcggagacgttacaattacaggttcacagatttcgggaaatgtagttaatttatccgcaaatgcaaatgttaaatcaaatactgataatgttgttaatcctaacgatgaaacaaagccgaataacacaattataggcggcaacggcggaagcggaagcggcagtaacggctcgccgacaagcacagtaactgtaaagttctataacggatcttcattatataagtcagtttcagtaacaaaaaatacatatctgtcgtcagccaagagaccggctgacccgacaatggacggcaaagaattcgtaggctggtatttgtcaaaggaacaggcagataaggcggatactatttctccgtttaattttgacactacaaagataacaaaagcaatgagcttctatgccggatatattgagtcgactaagccgacttcaactccggcagcaacaggttcgccggctccgacagccgatccgtcaaaaccaacggcaacagctgcacctgtaccatcggcaacggctgcacctgtaccgacagctacagctttgcctgtaccaacagctacaactgcacctgtaccgacggcaacaagcgaagctgtacctacagcaacgccaactcagaatccggatgttacatattcagtaaaagtagctgagggtattacaggcggtactttgaagatagttaaacaggcagagccttcaaaaccaacagcagaaccttctaaacctacagtggaaccaacagagccaacagacgcgccggctacagcaacgcctgaaacccctgtgacaggagcaacagattttgcagttaaaggtgatacgccgtctgcggcaggttcggtatataccaatgatgataatatcagcgttaccggaacttttggaacaacaatagttgaatatactgaaaataacgagcctgctactaaaatgataggcggaaagccgtttactcataatatgcaagtccgtttggcggcaaatccttcagagcctttacaggagcaaagcggaagcactgcgctgataatagcgcctaaaaaagacggaaagtttacaatctattatagaagacaggtaacaaacggcgatcctgacgttatgagcgcaggtgatggcaaggatatcaagctttcacagaacgataacggttcatatagccaggtaagcggcgttatggaaatgcctgaaataaatgatgaaaagacctacgcatttggaacgcagacctttgatttaagtgcaggcagtgaatatttgctgtgggcaagaggaacaacaggcacactgtatggatattcatatgaaccgtcagcatcagcagcggcagcagaagtttcagctgcagaaacagaagaattggttgacagtcttgatggattaaaggcaggagataaagtaactgttaaagcggttgcagaatctgcagcagaaagtataaaggtgtttacatctcctgagacgacagttacagaagtatcaggaaatccgggttattacacctttgaaatgcctgcgtcagacacaatagtaaatgcacaattcggtgaagctgctgctacagcaacgccaaaacctgaacctgtaagccataaagcagttttgaatgtagaaggcggaacaggaacattagaaacttcaaaagctgttacagcagacagtgaagctgtgctggcagaagattctgaatattctgctaatataataaagaatgttatagatggtgttcatgaatggacatttgaaaataatacaggaagtgaaataacagtaggcgaaatattcagcaacgaaggtttaacggtatttgcagattcatcgaatacaataaagattggtttaaacaatgatatagtaatgcgcggaagcggatttgctgacggcgacgcatcgtacagagcaatcagaattgtaatgcctgttacaggaaaagttacagttgaagcgtttacaatgagagctgacggaaacggaggcgtatatgtaaaagccggagcagacggtgaagatgaagaagtattaaccagcacagaagaggatggaaaaaatacaatatcaggcacaacggcaggagctattgcggcaggtacagacgtatatatttattcgcctattccgttcaactatgttagagttgcggtaacacctgatggtgacattccggcagagccgacagctacagcaggaactgttccgacagcagaaccgagcgcgacagctgcaccaacagaagcaccgacagcagagccaagcgcaacagctgcgccaacagaggctccaacagcagatcctacagcagctccgacattacagccgaacgagtatgaatttttaaccggtgcaacagtaattgttaacacaaaaccaaataatgcaggcgatgtggctaatataacagttacaggaaaagacggaagcaatatcacagtttctaacgcatcgtttgttatgcctgatcaggatgtaacagtaagcgttgtatattcaactccgtcagagccgacagcgacccctgcggagccatctgcaagcccttcagtttcaactgctacacctaatcctaaccttcctaatgatattatttggagagttgacgaccctgaagtaagtcaggcgttagaagcttattctgcaaataacggtgcggaagccgttgctgcaggagtagcagaggttggtcctaatcaggtgtttgaaagaaacaagaatgttaagtatacacacactaacggagtggaatataactttactaaatctttaaaagccggctcgggaaaccaaacaaacagatatgttaaaattactcctgaaacatcttgtacggtaacagtcgtatttgacggaaacggcggtgaaggaagaacacagtatatttcgcagagcggtaatgttataggctcggcagtatgtgataagggagtttcaaccgttacagctgatgttagcaaagacgatttgtcaccggtttacacttacggcggcggctcaaataaaaacgtatatgctgtctttatagaatattacgacgagacgcctgataaaacaattaccggtaatgtaacaaacagcacaggtcttgacctgagcgctgctaaaatagttttcacaaatgttaatgacaacactgatgttgtgacagttgattatgcggaagcatatgaggcaacattaacaaagggcgaaacctatagtatatctgttcagggagtagacagcgtttgtccaacaacgttaacaaacacagttaccgtgaacaaaaacagatatgaacagtctcacgatattaaatttgttaagatagaagacgttgaggttacaggtacactttatacaacattttctgatgatatgagaaatcagaatgaagtatacacaggttctgacgctgttaagattgcgttcacaaaacagggtgaagcagcgccttatgacgaagtaactgtaaacagcgatggtacatttgccgcaaaattattaacaaacgaagtgtatgatgtaacagtagtggaaggtccgtcaggatatacattatcaaatctgtcatcaacatatagtcttccgggcggagatgaaaatccgtttaaaaatgttcttcttataaagaacgacgtggatgttccgtatacagatacattatacgtaggtgcagataaggaatataaaaccgttaatgaagcggtttctgcagttcgcatgatggctgataaaggcgacaaaccagttacaatagtaattgacccgggaacatataagggtcaggttattatcgaccagagcaatattactttgaagagcgctgatgaatcaaacagaccggttatcacaagttattacggtataggatatgtttattattcattaaacggcggattctataatgctgactatgcggcagccaagacaacgaaagcagttgcttcaaagtggggacctaccctttatgtaacagataaaggttcaggattcctggctgagaacattgattttgagaatacgttcaaccagtatgtaacagaagaagaattggctgacggtgttgaaatgaatgaaaagatgtttgagagaaaagccggcgttgacgttaccaccaagaattcaaccgaaagagctgcggcagtagcttttgagggcatgaactcggaattctaccgttgtaagatggtatcaagccaggatacattgtatacaggttccacaggatatttcaaagaatgtgaaatctatggaaacacagattatatattcggcggaaacagtgtggcgtttgataactgtgaccttgtttggtatggatattcagacgtaaagagcggcggttacattgcagcatgcaagacttcatcagtaacagatccgggatacttctttaataactgtactattaaaaacagcaacatacaaggtatgaagtttgataaaggcggttttggaagaaactggggcggagcaaattcagcaatgttcttcaacaacataactcttgacggagttgaaaagccgggcggctggacagcgatgggcggagagttaagtttatctagagttttcgtaaacaacgttcataacgttggagagacaattgatttgacagcaggaagtgataatccgaacggagcggcacaaacgattccaaccgttgaggattatgtaggtgaatggacacctgttcactatacgaaatagttagttataataaaaatgacccgatatatcgggtcattttttatgttttgattttttataataaataaattttttgttagagaagtttaatatttttttatactccttaaaattgtacagttttatttggtttacagatgataattccgaatgtatagacttataggttatctaatgtaatagtctacatattgattgtttttttgtgttatgattatctaagacaaaaatataaattagttttgaggtattgtcatgtatgaggaaaataaggattatgaaaaatttttaagagatagaataaccaagttgcgaatagagaaaaatttatctgagcggcaattaagttttgaattagggcattgtgagggatatataaataaaataacttccggttataccttaccgtctataaaagaatttgtatatatttgcgaatattttggattaacaccaaaagagttttttgatgaagaaattgattatccaattttaatgcagaaagcaataaaagaattaaaaggacttgatgagagcagtgtattgttaattataggttttattaacaagttaaaaaataaatagccaatgattcagcaagcatcggtagggcagatgaaatctgccacgtaaggcgcgcagtcgcagtatatattaaaaataaaaaattatatgaaatagtaaattagtgtatgcacgtatagcgtgcgatgataactcacctaacgagcttgctaacatacatcacaactaagtgatttattgacctcgtaggttaataaatacaaattaatttggctcacacgcaccctataggtgcggtcacagcaagcctaccgaagttcgttaaaacaaccatttttattgcataggaaagttgatttatttctttgaacctaaatagtttaaaatttacaaattgcggacatacaaaatattggttgtataagcaattaggcatgagttatcaaaactttagtaagatggtaaataacgagacaaaatccataaaatatagcaacatagatgcaatgtgtcaaatattaaagtgtaaaccaagcgacttatttgaatacaatcctaatatacctatgaacaaaaattagatataaatatttggggtttattgcaagcatcggtagagctgtgaccacacttttttaaagtgtgtgtaatacaaattgacttgtattgatatacctacaatgtctgtgaccccaccagtatggtgggtgtgatacaaagtgacttgtttttgttagccttcaatgtcaataatatgaatacgcaaatattaatatgtatactcaatgcagatgaaatctgctgcgtaaggcgcgcagtcgcggtatatattgaaaataaaagttaatataaaacagtaagatagtaaaatagtaaaatagtatatgcacgcaagcgtgcgatgataactcacctaacgcggcggctgtgccgccctaccgaagttcgttgaaacgttgtgttttaagtatgaaataaacttgttttaatgaataaaagaatttgtatatatttgcgaatattttggattaacaccgaaggagttttttgatgaggaagcggaatatccaattttaatgcaaaaagcaataaaagaattaaaaggacttgatgagagcagtatattgttgattataggttttattaacaagttaaaaaataaatagccaatgatgaggcaagcatcggtagagcgtacgaagtacgctgcgtaaggcgcgcagtcgcggtatatattgaaaataaaaaaatatataaaaaagtaaaatagtatatgcacgcaagcgtgcgatgataactcacctaacgcggcggctctgccgccctgccgatgttcgttaaaacattgtatttttatctgatgattaaaactgttgactaaaaattaaccgttagcactttaattcttgtatttttaaaccctttgtgctaaaatgttttaaagattattttaaaatataaaaacagaaaggtttgatatatatgaaactaatgatagccagcgatattcatggttctgaatattattgcagtaagctcctgaaagcctttgacagagaggaagccgataggcttttgctcctgggagatattctataccatggccccagaaatgaccttcctaaaggttatgacccaaaactcgttatcgctatgcttaacggcgtgtcagaaaatttgctgtgcgttcggggaaattgtgacaccgaagttgaccaaatggttttaaatttcccaataatggcggagtatgctttgctttctgtggatgggacaacaatttatgccacccatggtcaccattttggagaggataatccgccgtctttgaaaaagggcgagtttttgctctgcggtcatacacatgttccaaaatgtgtggataaaggcggatatttttatatgaatcccggttccgtgtcgattccgaaagaaaacagtaagacttcttatatgattttggaggacggagtgtttcgctggaagacattggacggagagcaatatatgcaatatgatgtaagttctgttcaatagattaaattgataatcaggaaatattattattaaaaaatgtgaattaagaaagacagagtgtagatttgtttaatagaaatttgtttctgattaggagtaaatcgttacagatattaaatgacatatttgaatataatggataggaaacaaaaaagttaaggtcatgtaaaatagaaagtataaaagaagaaagctccgatcctatacggatgaattcaaacaatagttagttcagctataccataatggaaaacgaaaatgtgatatttgccgtgaatatgatatagccacctcattgctggataaatggctgaaacagtcagcagttagcggctcttttcacgaaaaagataaccattctgcagaagagcaggaaataatagaactgcgcaaacgtaaccggcaattcaagattacttaggtaggtcacacaaagaccgcgttaggcgcgcagtcctgggtaaacttttcaatgtagtttgtaccataaaaaacggctgccagtttggcagccattttttatttcagaattatttgtttaagtctgctgcagatgaaaactgcggttttaatgacttataaatgttttggtagacagggaagtagtttttgtaggtctcaacattttcctgaatcggtttcattgtatctttaacgctgattgcggcttcgcatgcttccggaacgctgtcgtaaattccggctcctactgccgctaaaagagcaactcccaaagccggaccttctgacacatttattgtgttgatatcacagccgaacatgtcagcctgcatttgtctccataatttgctttttccgccgccgcctgaggcacgtacttcagacgcgtctatgcccatttcttttattacagacatgcagtcattcaggctgtacgatacgccttccatgacagctctgagcatatcatattttgtgtgctttgctgaaagcccaaaaaatacgccttttgcatttgggtcattgtgagggcttctttcacccatcaaatacggaaggtatataagtccttcacagcccggcgcgattttttctgcctgcttatccatcagatagtatgggtcaacccccatgccgtccgctgcgtccatttcagcatggcagaaattatccctgtaccattttagcgataaaccggcgccctgggttactcccataacgtgccactttccgggcactgcatggcatagagtgtgtactctgccttctttatcaatttgaatattgtccatatgtgcaaaaacaactccggatgttccgatagtggaggaaacaatacctgttttaacaattccgtttcctacagctccggcagcctggtctccggcgccgccgacaacgatagttccctcgttaagtccggtgagttttgccgcttcctgatgaactttgcctgttacctcgcatgattcatacatttttccaagcagatttttgtctatattgagtttttccaaaacctcgtcggaccaacagcggtttttgatatccataagctgcataccgctggcgtctgatacttcagtagcgtattcgccggtgagcttatagcgtatatagtccttaggaagtaaaatttttgcagttttggcatagagttcaggctcattcttttgcacccaaagtatcttagcagcagtgaatcctgtcagtgctggattgccggtgatttctacgagacgttcctttccgactttctctgttagctcgtctgcttctgctgtggttctttggtcgcaccaaataattgattttctcagaacgtttccgtctttgtcaagcataacaagtccgtgcatctgtccggaaagacctattccttttatatctgcagggttaacgcccgattgttttataacactgtttatacttgtatatgtagcgttccaccagtcctcggggtcttgttccgcccagccgattttgggctgataaagaggatactccaccaaaaagctggatacagcgtttcctttttcatcaaataaaacggttttagttccgcttgtgccgatgtctacaccgattacatatctcattgataacactccttatataaatttggttatatttcctataaacttctatttaatataacatacggaagacaataaatcaataatgatttaaaattttgctgcaattatttgtaggattacaatagatgtgttacaaagagaaaaaaagaatacggaaaactcataaattgtgttatagttatatcaccataatatcacatactacgacggtacgctcgcctccttagccgataaatcacataaacctcaccatcatcccaatcagcataccgctgatgagttgaaattgattactgatatgcgccgccgtaatccaaaatctattggtttatatgcgttagatatggatgatacttttgaaataatggttgacagcagtcctaaagatacttcgctgccaatgaacctttcagaaagcgagtttaaaaataatagggtgaatttgaaagatccggataccggcgtaatttcaaaatcagtacaattttcttcacccgggtacaaggttttagatttagctgcccctattgatgttaatggaagcttttatatatatgttagacagtctaatgattcgaagacatccactgatgaatatagaatagccggatgtactaaaggcgttaatgcttcgtactatcagcctgagaaaaatgtatgtttttattcctcttcgaagaggggcgatacaattaatggctggggtgatatatatttgagcggatataattggtgtattaaagcttataccggctcaaacagcttaaagccgtccgcttcgccattgccaaccacatctccgactcaagagccaatagcgtctgaatcaccgagtccaacgtccgccccaacgcaagagccggtagtttcggaatctccaagtccaacgtccgccccaacgctggagccgatagtttcagagcccccgaatccaacttctgctccgacgcaggaacctatagtaacagattcgccaactatgaccccaacttttgctccggttgtttcaccaacggcagaaccaattgtgtctccttatcccgaaaagtttggagaaccggaaatcgtagtaaataaagctgaacagaccgtagatgtgactgtgacgcgagttgacgcaagctgtgaagacagcgctgtattagttgggatctataacagtaacggaattctggtaggatttagaaagataactcctgtgtttgatgaaaacggaacttttatgataagcggagttgaatacggcggattaaatgccaatacattaaaagtgtttatttggagcgatatgggagacataccatatcttgattctccacagagtgttgatttaaattaatataaagttttagataatagaaaggcctccattttttagtatggaggctttttgctgtatgtgttaaaaatattaagagttttatttaagtaaagagcgtatataaggatataataacatttataagagatattttttaaacttttattatttagttgttttcgggttcatcgttcatacatatatcatacatttcgcctgtttttataagtgaaaactgaagtcttgcatcggcttcactgatttggccgttacgtatctgctcaatcgctttttcaatatctttgcgcataacaaagtatgctcttttatagttaatcaaaatatcacctcaaactgttttaatgttacatattatgttattaagtataacatatattctgtgcttttgtcaacatataatttattatgaggtgataactagtgaaagaggataaattaaaaatatccaagagaaggctgaagggggacgatggatttaaagtcttttcggtaagactggaacaggagctcgttgacagaatagataatattgccgaatatacaaataggtcgagaaatgaattaattggtattttgcttagatatgctgtagaaaattgcgagataacagactaaacatctgcatttaagttattatattaagtacgcgtcttatttttaaacagtctaaattgtgcttgttgtacaatttgaagctgcttatttataagacgtgttttaatgtctgaattaaactttttaatttaatgtactttgcttttgatttggggaatttttggaaattttttatttattgatttgtgtatctgtcaaattgacaaagtgtaaaagttgtgctataatttacactcgtttcatataatattttagagtgagacaagatataaaatgtacataggaggaaacgtaatgaaaagatttgatttcagtatgaaactgatagttttagcggtttgtgccgccattgcggttaacctgttctatacaccgaaaactgatatagtttctgctgaggacacagagatgaggggaatttgggtggcgtcggtcggaaatttggactatccgcagtcgcctactgctgatgcatggcagcttagagttcaaatggacgaggttctggacaactgtcaggatatggggtttaatacagtatttttacaggtaaggccgtcaggagatgctctttataagtcggatatatttccgtggtcgcgttatcttacaggaatacagggtacggctccgagcgacgggtttgatcctcttgaatatgctgttaacgaggcgcataagaggggaatgcagctgcatgcatggataaatccatatcgagttaccaactcgtctaatgataatggcaaattggctgcaaataatccggctgtattaagacctgacttggtgcttaccgacagttcgggcaagatgtatttgaacccgggcgaagctgattctatcgacattatacttgaaggaatcagagagattgtaagaaattatgatgtcgatggaattcacatggacgactatttttatccaagcagcggatttgacgattctgcggcctattttaagtatcaggacgcatatccaaacaaagcggactggcgcagaagtatggttactactttaatctcttgtgcccgtgacgcagtaaaggaaattaaaccaaactgtatgttcggagtaagtccgagcggtatttgggcgaatgccggcgacacaccgggaggcagcaatacaaatggaagcagttcatatcatagcttgtatgcggataccaaactgtgggttgaacgggaatatcttgattatataatgccgcagatatattggtataatggccagccaaacgctgattataatactttaataaattggtgggcgggtgtttgcgccccgacaaatgttaagctttatattggcgaagcggcttataaggcggcttccggttctgaagctgcttggaaagggcagaatggtataaatgagttgtccaaccaggtttcaatgtgcaggcagagccagtatataggtggttacagcatgtttgagtattcttcgtttatgggaaattcaaatctgtataacctcataaaacagcttcattctacacctgccgctgctccgacgctgggagaaattaatcagcctaatcctcagcctgaggcaactcaggcacctgaggacaagccttccgagccaactcaggagccggcttccgctgacccgacaaacgctccgattgctgctgaccccacgagcgcaccaacaaacgtcggagacgcctcaaagtttactgatatgggtgaatatggctgggcaatgccgtatattgaagatcttgtaaaccagggaatagttaaaggcataagtgatacagagttcggacccgatatatttatttcccgcgccgacgctacggttttgttatatagaatattaaaggaagcagatataactttcacagaaaactttgatgatgtatatcctgataaatactattatgatgaaataggacaagccaaagcaacaggggttgcatggggaattggaaataatctgtttgatcctgacggaactatgcagaggcaggatatggctacacttgcttatagagttttgaaagcccgtcaaattttgacggcaattccgaacacggcaaaggcgcttaataattattgggattggcgtgatattgacttttacgccagagacgctatagcggcgtgtgtagaaaacaaccttatgggaggatacggcgacggaactatccgtccaaaagatgacgctacaaggattgaggttgctctctttgtgcagagaataaaaactcttatagacagcaaataataacaataaggtatatagccgcggaaacatgtttcggtttccgcggcttaaaatttgttaaaaaccacaataaagactataagagacgagccaattaagattgatgtaataggcaatttttacaaaaaaacataaagatgtcagatacaaccttatttttgtgcgatttgacttgataaaattggaataataaggtacaataaataatggagctgtattagaatgatgaataatattataataatacagcgattatatgcacaggagggattttatttatggcaaacaatacttctaaggcagagacgcaagataaaacggcaaaaaatgttgctgagtatcatagacaattaaaacccggaacgcccgagtttgatatgaaaaaggactttataaaggatgagattaccggtaaggtgaaacgctattttggaaaaacaatagcaaaagcaggcgacatggaagtctaccgtgctgcagcgctcactatacgcgacgagataatggaaaagtgggtaagctatcaggaaaaatgtgagagaaagccgcagaaagagctttactatttatcttttgagtttctaatgggcagagctatgggaaacaatttaatgaatatcatggagacggaagtttataagagcgcattaaaagagctgggattttcgctggaaaatattgaagaggtagagactgacgcaggcttgggtaacggaggactgggtcgtttggcggcttgtttccttgattctctcaccaatttggatttgccggcctttggctgcggtataagatatgagtatggactgtttaagcaaaagatagttgacggatatcagatcgagatgcctgacccgtggctgcagagcgggaatgtttgggatatagcaagacctgaggacactaaagaagttcattttaacggccgtattattgaaaagtgggaagacggccatatgaagtttgagcatgttgattataatactgtcatagcggaaccgtatgatatgcctatcacaggatttgatacagacacggttaacactttaagactttggaaagcctgctcgcctgagattatgaatatgacagagtttaacagaggagattatgctaaagccaatgaaaataaagatttggctgaagttatttcaaaagtgctttatcctgaggacaatcattatgaaggcaagcttttgagattgaagcagcagtatttctttgtatcagccacaatccagtggataatatccaaacataaacagaagaatttgtctatgtttgatattccggaatatgtgcagattcatataaacgatacacatcctaccatagctatacctgagcttatgagacttctgatggatgaagaaggcatgtcgtgggacgacgcgtggagtatagtcggcagaactttcgcttatacaaatcatactattctgtgtgaagcgcttgaaaaatggccgatggacatggtggattcgctgcttccgagacttggtcagattattcatgagatagacaggcggcagagaatcgccctgaacgaacgtttccccggtgacacaggcaagattgagtatatggctgtaattagcagaggacaggtaagcatggcgaatttgtgcttgactgcctgccatagtgtgaacggcgtggcggctttgcatactgaaatactaaagaaagaaactttcaaggattattatagcatttatccgtataagtttaagaacatgactaacggagttacattcagaagatggctgtataaggcgaaccctgagctttcttcgcttatttgtgaagcgataggcgacggctgggtgaaagattatacacagctggaaaatctgcttccgtttgctgatgacaaagtgttcagagataaatttgcaaagattaagcttaataataaggagaaacttgcaaaatatatactggatcataatgatataactgtagatcctgcatctttatttgatgttcagataaagagactgcatgaatataaaagacagctgctcaaagcctttcatataatatataggtataaatctattaccgaaacacctgaaaatgcaaataagatgcccgagacatttatatttgctgcaaaggcagcaccgggctatcatatggcaaaactgataatcaagtttattaataatatagctaaggttgttaataatgaccccaggacaaaggatattttaaaagttgtatttattgaaaattacagcgtatctattgctgaaaagattgttgcagctgctaacttgagcgagcaaatttcaacagccagcaaggaagcttcaggaacaggaaatatgaagcttatgctgaacggcgctttgacaataggaacaatggacggtgcaaacgttgaaatacgggagcaggtcggcgatgataatatattcatttttggaatgcagtcagatgaagttttaggactatattcgacaaaccgctcgccgagccctgaattgtatgctacaaatatggggattaagagcattgtcgacacactgatagacgggacgttctccggagacgagcataatctgttttatgatatatataggtctttggttcagggaaataacggcagttttgcagacccatatttgcttttgcctgattttgaatcgtatgttcacacttgccagcaggcaaatagtttatataaagataatcaggatgaatggaacagaaaagctgtaataaacacagcaaaagccggattcttcagcagtgacaggacaattgaaagttataataaagaaatttggcatttgagataaaaataaataattaagcccatggcatttgtcatgggcttttgtttaatatataaagaaaagtgatctttgctgatattatgcagtttgccttagtagttaattagtttattttgtattagtgaatttaacacttatagaagttaatatataagtgaatttttttcacatatatttaatataaatattacaccgcattgttttgtgaactaatatttatttatttttgttttttattttatattccaataaaaagcgtaatatttatatatttattatattatcatttatttatcaaaaatatatgttcgaaataaaaattgttaataatttagccacaaaagtattgcgcttttgttacaaatatgctataatgtaaacattaaatgtattatatttacagcatatttgagttacggtacatatatattgtgtatcggttgttgtgtttatgtttttagatacaacaggtagtaattacatatgtaaaaaaattaaatatataggaattttatattccaaaaaacacaaggaggggttttttaatgagaacctttaagagaagtttggccttagtattggccatcgctatggttttgaccacctttggtatgaccgttgtttcagcggctcagtacaatgatactgaaggtcattgggctgagagttatatcaacacttggtctggctatggcgtaatccagggcgacggcggttatttcagacctgacgacgctattacgcgtgcagaagttgcacaggtaaccgataatgttatcagttatgaaaaaattgctgataatatgttcacagacgtatcaactacagactggtttgctgatgcagtattaaagctggttgctgctggtactctcacaggtaacggggacggaacgatgactccgaataactacatgacccgtgaagaggctatgacaatgcttgcgcgtgcgtatggtcttacggttgagaatactcaggcaggcattacccagtatgctgactatcagaacatttctgactacgctacaggttatgttggagctatgaccgctgccggatatgtaggcggatatgaagacggaacaattcgtcctaaggattatatctccagagcagagttcgttaagattattgataatatgattaagctttacataacagagcccggttcatacggtccagaatatgttggcggtatagttatgataaagacaggcggcgttacccttaacggaatcgttgcaggcggcgttgttgtatcacctcaggtgagcggcgatgttactataacaggttcacagatttcaggggatatcgttaatctctctgaaaaagcaaacgttacatcaaacacaggcaatgttacaaacccaagcgcaaccacaaagcctaacaatattgttataggcggcggtggcagcggcggtggcggtaacggcggcggacccacatcgcttactgttaaattccattacggcgaaaattatggaactgttaagactaagagtgtaacaaagggcaagaagttgtcagaaagttctgttcctacaccgaccgaaagcaattgggacggtctttggtacacatctaagtcagcagcagagaaatgcagcggaactacattcgatccgaccgtttcagctgttaacaagaattacgatttgtatgcaggacatattaataactatgatctgaaagacgtggaaatagctgttgataataagactgattatgtcaacgtttatgttggagatgttttaacagctacgaatcttgctccggcagctgctaagaattatgtatcatatcaatggtacagaacaaaagaaagcaatggaacaggagacaagatttccggagcaacaaagagcacatatacagctgtagaagccgataagggcatgtatctaaaagttgtagttacaggtgatggaacaaactataatggaactgtgtctgatgtttcaactatagttttggcaaaagacgctccttctatctatcctgaaaagacaacagcagcatttggaaatgacgcagcaacaactgtaactctgacagaaggtcagacaattactggagttaagactgagagcggagaaatgcttacagctgatcagtatacttttgatgctgaaacaggaaaactcacaatctcaaaggattatcttgcaggattgacagacggacaaaatgtattcacaattgtagtatctgatgatgctgcttataatgtaacatttgttgttacaacaacaggcggccctacagaaggaccggttcctacagaggatcctgagccgacagcaacaccggtaacaccggataagccgacagcaacaccagtaacaccggataaaccaacagcaacaccggtaacaccggataagccaacagcaacaccggtaacgccggataagccaacagcaacaccggtaacgccggataagccgacagcaacaccggtaacaccggataagccgacggcaacaccggtaacaccggatgagccgacagcaacaccattaccaacagcaaccgtagcaccgattcagaagtatgtagcaacggttaacgtaacaggtggtaaagctgtacttaaggatgcgaacggaaatacttatcctttagtagaagtttctaatcctacagaagaacctgttccgacagcaacagcttcaacagaggagccaacagaagccccggcaacagcaaaaccgacaatgccgccgcttacagagattacagaaagctacacatttatagcagatgatttcaattcagcaggaactttgccgatcagcgaaggtacaatgcttgataacggaaaagtatattcaccagctggaaacaatgctgcgacaaacaagaaatcttcagaaattaatggagctagtcatcttaattcaatgcgtctgaagggcgctcagaactcattggtatttaaaacagccgttgacgttgcggtaactgtatatggaaatgctcatgattccagagtatatgcagcaggcacaacaaacggcggagttgaattgggtaaaggccaaacaggaagcggagtatttacatttaatgcaagtgctggaaccactgtatatttgacagctgttaacgacgctgacaattcaggcggcgacttgtttatagcaggatttactgtagagcctacagccaatgcagcggctgaagatggtgcggttcaatatttaatcccggaaggcgatgtagtaacagtagacgcaacacctgatacagcaggtttgtatccgatagtaacagttaagggtgcagacggacaggacatcgcggtaagcgataacaagttcacaatgccgggacagaatgtaacaacggaagtaacattcggtgacgcaccggcaacagcaacaccggctccaacagctactgtttcaccggaaccgacagccacagcaacagttgctcctccgacagctacacctgtattcccaagctatgctaactggaatatcggtcaagcaaaaatcgataccacagatggcgcggcagcagaagtagtatatcctgctgaaggcggaaaagcagctatcgaagtaacgagcagaaatatttacacaactttggatcaggaagtctcagcaggtcaggctaatgtttcattagatgtatatattgacccggcagttccaaagaactttagaatttatttagagagcggaacagagaactatcagaatcctaatggtgaatatgtatttgcagaagtagcaaataacaacaattcatctgtaaattatggacctaatccggcagaagaaaataagctgtttgattatagtcaaatgacagccggctggtataagtttaatataactctcgactatgaaggaacagactttattactttaaaagttacagctccggatggcacagtggcaggcacagcaaagatgggcgcaattgcaggtaagtctacagctttaagacaggttcgtcttattcagacagctgcagccgcacaatttgcagatatggctataaccgtatcaggtcagccgacagctaccccggctccttctacaccaagtccgacagcggttccggtatcttcaatagtagttcctgctaatgatttgactttagacggcggggcagtgcttagcgataacgctggtcaaaattatacatggactgaaaaagcaacagatgagatgaaatcaacatttggcgatccaatcgatagcgttaacacagcaaagtttgctttaatgaacggcgatggaagaaatgtatctaagacaatcaatattccggctgacggcgaatataagctgatggttatgagtattgaatataataacagatactttacagcgagtgttgataatggcgctgcaattgaacccgagagtcaaactccaggtaagatggcaacaaataatgcaggtggaagcaatgttgatttgactgtgacagaatataatttaggcactttaacaaatggagaacatacagttaaggtaacatctgcagctaataacagcagaaatattttggctatagctgtagttccggttgctgcaccggcaacacctgatccgtcagcaacaccggaaccaaataagtatatcgcaacagttaacgtaacaggcggaacagcagttcttaaggatgcagaaggaaatgtttatcctacatatgcacctgaagctacagtagcgccaaccatagaaccttcagcagagccgtcagatgctcctacagcggaaccgtcagacgctccaacagatgagcctgctgctacagcaacaacagctcctgttacacctgtaacatataaatatacatcaacctcagaaattaagggtggaaatttgtgcgaaggcgatacatgcacatttgttgatgaagcaagtgaagagattagaactttgtttgcggatggaagcgatgctgctaaagtagctcctgcattaacagctaactataagaattatgtaggtggaacaggcagtaaggcatcacagccatacattgaaggaataaacttagagccgggtacgtacaacgtttattatttgggctataacaacgaagttgcaattgatgctactattggagacataagtttctcaatccctgcagccagcggagttccggtagctagggaagataataatgcatctcgtgtattaaaggcatataagtttacatttactgcagaaacagctttaacaaacgctacattaacatttaacacaacagaacaatggttgccggatatattctcagttattttgacaaatacaacagttgcagctaacgctgctggtgttgatggtgcagttcaatatctgattccggaaggcgatgtagtaacagttgacgcaacagctgaaactgccggtcaggttgcatcagttacagtaacgggtgcagacggacaggacgttaaagttgagaataacaagttcacaatgccaggacagaatgtaacagcagacataacatttgctgaagcacctgcaacagcaacaccggaagcaacagcagctcctacagctaaacctgcggaagttatgattgccggtgatatgactctcaacggcagcgcaaaagtttataatgacgcaccaaaagagccgacagctgcttacactgaggaatattcgaatatctttggtgaaaacttctctaaggctggaacaagcaaagttggattccttggttcaaactttggcggatatgtaacaaagaattacacaatcgatgagaccggatcatataaagcatatattatggtatcatatgcacagagcaataaccagtttgcgttaagcaaggatggtacacaggttgttcagggaacattggttgacaagagtgaaaaggtaggaacaaacggtcaggatttgtttatctatacatatgatatagataacttagaagctggaacatatgaatttaagtattattcagaacttggtcagtgttcagactttgtagctgctgctatagtggccgctgaagcacctgcaacagcaacacctgcacctgcaacagcaacacctgaagctacagaagcgccgacaccggacccatcagctacacctagtgtaagatatacatatacaatgggtgcaacaacaaacggttcatttgacgttcagaatgtatctcatccggagttagttacaaaaacagctgacacagctaataaagttaagtggacagcaaaaaatgacctagcaaaatttgagaatatagtagatcctgagccaattaccgtaggtgatattacaattgatcctcttaataatgctacaggcggagcgtcagatttctggaagcataacacagatacagttgacggtatcagcggaaatggtaatcctcgtccgtcttcgttgactggtactccttcagataaggacttgccgacaaatggaacagttttaaaacttacatctgcaaagagcggtcaggcagtagttaactatatgactaatgcaggtaagatatttacagttattgaagctaaacagggcgaaacaaccggatcatacttatataaggtaacagctccgtcaaaagctgcatatacatctgatcctattgagatgaaggttggatacgattattatgtattcgttccggcttctaagattgcagttggatatatcgagtttacaccatatattgaaactaccgaggcatttgccggtgatacaattaaagtattgccatctgcaaacgatggatattcagtagacgaagtaagctatacacctgaaaacggaaataaaactgttgtttctcaaaatgcagaaggttatacatttagtatgccggaagcaaatgtggagataaatgttgcattcaaagaaggcgcagagccaagtgaaacaccggctcctacagcaacagctgcacctgcaacagaaacaccggagccaacggcagaaccaactgaggctcctactgcagagccaacagcagaaccaactgaggctcctacaatggcgccggtaacaattgtaacagctgaatccggaatgagcacatcaaacggcggaaaaacagctgatgtggctttcaaggatataacagctgactatacaggggtttatccagcaatatttggtgagaacctttcaaaagccggagctaagaaaatgggatacctcggcggctcgagccataattacacaacaatgagttatgagattcctgaagacggattatacaaagtatatatgcttgtttacaatcctaataatggaaatagtatgtcattaacaaagagtggttcttctactccggcttttgatgctcgtcttatagacataagtcctcagctggcgtcagcaagtgatggttatgctattaaggctctgacatatacagttgcattaactgcaggaacttatacagcaaagtattacagaactgatacatctttctgttcagaccctatagcttttgctatagcaccggtaagcgaagctgcagctaacgcagcaacagttaatgttacagatgtagccggcgcatcagctgagttacttgattctaacggtatagcttatgaaggtgatattccggaaggtgatgtagtagaaataaaaacatcagatgtaacaggatatgcagtaagtgtatcggttactgccggaggaattcagattcctttgactgcagataataagtttataatgccaaaccaggcggttacagttgatgtagtttataatgctttacgtagtgtaagcgtttcagctacaggcggcagtgtagaactttataatgctgctgataattctgtaatagacccagctaattataacagtattccggaaggaactgttataggtattacagctacaccagatgttgctgaacaagttgcaaagattacagttgttggagcaacacttgacacagataagaatttgtttactgttagagacagcaatgttgaagtaactgttgagtttgttacaccaacaaagtataatgttaatttggatgcttatacaaacggaagtgtttcatcagataaagcaaccgcagcagagggtgaaaaagtaactcttacagttactccgaacagcggatacgtaactcaggaagtatatgtggttgatgaaacacaagctgcagaaacaattacatcaacggatattacaaaatatacgtttacaatgcctgcatctgatgttactataggagcaatatttgctcaggttactggatatgttgagtatttgtttgatggttcgcacaatacgtctattaattcaacaactgcaccggctataacatatcaaggtggtacacatcctactccagtatttacattgacaaatacatctaaaagctatggagtagcaacggctcttgatattaaggggaaacttcctcttagcggaacaagcataagctggaacaagaaagcatctaagggttcaaatggagcaggatattttattgatttgggtctcgtagattcttatgcagatcagaattgtcagatattcacaatgttgtcgccaaactctgttgctgatacaacaatagcaaaacttgagggtgcaaatgcaggcaagtttggtactattacggcagcggcagcaatggctgaaggcgtattcagaggaattgacgcttctgatgcacaggctgatggtacaattaaattgacatatggtaataagcaaggtctggtatattatatagcaattgcttattatacgccggtggttttataatctatttgcaattaatttagtttttcatcaaacaagggactgcatttgcagtcccttgttttttatattagtgtgatttcttaaaatatttttacactacagccggattatattataatattactcctgtttatctttaataccccatagcgttttgaagcataagctggttaattcgttcttctgttaaacggttgttcagtctttcagaatttaactggttattaataatttggttgtaatactgcatatatatttgtttcattacattatccattctggaatcctctatatccaaattattttgtgttgattcctgaccgttgagtacctcgttccagttataatcctgagaattattggcttctgtccagcgataatcttgttcatttttgtcatatttttgttggttaaaaagtgtgttccaataattttcatatgccgctttgtctcggtctgtatttgaagcgagaactgagttgatattagaaatagttttgttgttggctccatatgcgttgctgtaggctgagttgtaggtgtccagcatgttttctaataagtttatgtccgtgttatagctgtccgcataacgttcatatgcctgctgtgcaagctccggcaccatttctccgagtttgctcatatagtattggttggtttgcgctgcggcagtagccgcggcggagttcccataaccgccggtaagccccgcataattcgccatagcgtcttgacttgctctattaccctcagtgaggtatttttctttataggcttgataaaccggatcatcgtcagggtcatactcaaagtcttttcggttcattatagacctgctcaggtttgtgattgaatttaaatagcggttgttgtactcatctaatatttcgtttggagttgagaccccaagggtgttaaagtaatctgatgttaggtcctcaatatcgttttgatacgcccatgcctttccgttttcatctgtatataaggtgttcagcggtcttccccctatagtggccgagccgttgctgtaacctaacgcatctgctgatactccatattgtcccgcatattttgaatatgcgtctgaaacctgtactattggattattagacttggagtaatagcttaccagactgttctgtatttcagatgggctcgcatatgaaactccggcgttttcatccatatatgatggtttcatcaaagttcggccgcccaaggtgacggttccgctcctgtcgtcatagccaatcaggtcattgcttatccccatgttggtcagagtggagcggattccgacagtaccgtcctccctggacggtactgtctgtttctttgaaagggagggggatttgtttgctgccgccaatttgttatctgtgatatatttatctgatgtgtttggcatttgttctacctcctgtgtatgtgattatctctatgtcgtgcactgccgcctgacctgtgccctcaagcattatgcgaaaactgtcgcattttttgaatctaaccggcactttgtgaaccataaaaccattgccctgaatctcaccgcaaaacttaaaatcctcattgtcccaggctgagtatattttgactttggagcctgattttaaatccaggcggagatatactgtgtttattcccttgaaatcaaaatcatcaagggtaaattttttggataccacacaccagtttatctcttcatcgctctctcctgaaaatttatacatatcggttttagtaacgccgtaaagatgttcgttatagcgaacaaagtcaatgaattccgtgttgtcctctttatgccaaagactataaagagggtcatatactaaaagctcgttaccgtttgagtttccggcgcacgcatagtaacgctgtccgtcggttccgcttttgcaagtgaaatagttggtttttatacaactgctgattttctcaggttcaccgccgctgtactcataaaagccgtcggctcccatatagtaaagtatgccgccgagttcagcaatactttttccgtctattgcaccgccgcaggtttgcttgggtatagaaaaattttgcggtgagtctccgtagatgtggtgtatatagttgctcttaaaagcgacgacggctgttctgtagctgactatacctgtaaactcgccggcagtgccgatttcactgtaccagctgtcatctgctagacccctaaaggaattaaaattgaaacaatcgcctagtttggacgcatatatgtattcgccgttggttcctgttccaaacagacggttattatgaacgcatgcccagctgatatcaggaatacttatttcaatagtcacagaattgctgtcagtagtgtttttgaatagcccgtaactgccgtttttagtatataaaagaagtgaaagtttagatgttgtggcctcgtcaactaccgcactgactatttggctgtcagaagcataatctttttttgagtttattacatgggtgttgttttggtcttcactgcagccgcttatgattacactgtctcctaccttaaaaatgtcgtcaaattccgcgccgcttttctgtatataagcagtatatactccgcttatttcattatgacttgagtaaaattttgcgtctgtaacagtaatctgacgtcccatcttctttaactcattccctatttccccagtgtcagggtcaggaagatacctatagtacaccttgtcagggaaaatacatatgttcccattaaagtccactatagatttttcaccgtccaagagcttaatgtttgtgacagagctgcccttgtagtaaaaatagttttctgctacccctgtgaatgagtcaagacttcccggctggtattccggagccgtaaccgctgatattccgtttaaagaaacaatgtgttctctcggtttacgcggcgaggcggcaggaatagaatcggaggacatattatacatttcagacatttgtctgtcgtcaattttttctctttgatcatatccaaagaagtttaaaatatccactttttttgtgttgctgcttgtggacgaaccgctgggcggcagatacatattcctcacctcctaccagaaatttttgaaccttgccaaatcgttcaagggatttctggttttataatcttttttgtattcgctgtacaaattgttgtattgggtcatatgggcagaatacgcgtcgtaatcatgctgatagagcgccatttttgccaaaatatattctatatacagtctgtcatatggagggtctgcctctgtttcgtcgtctatgacgcgccgaattgccaaatgtgccgaggtttgcggagtaaatatatcatctgtaagatagactgcttctccgtcattttgatatacatagctatccaggcaggagtcccagttgggttcatcatctaagttttcgagaagtacgcattctatgttgtccccctcaaaaagtggaagctcagagccgaatatgatattctcactcagtttataagtaccttttacctcaatgtttctgatgttatcaggcttggtgagatacactagtttaagtattttaggagctgaattgctgaatgctgaggtcagtgaaccgcatagatgaggcaggcttcttaaatctgctttatctattaacttacctgccacatacgcagcttcaatatcgtcaaaagaaatatcatcaggcagttcaaattcatcagggcatgttactaaagtttcaataacggagtaatatttttttatgtcccgtcttaaagcgagtgaaacttcgtcgcaccagtgcagcttttcactgaaagtaaattgattagggctgagagcgtctgcagctgaaattgcgtttatgattttcatgtatccacctgccctctaagcctctttaaggctttcaatatatttttcagcctcaatttcctgtttatcgcttctttcaatggcgagagcaacacttctaggaaccattacttcaacgccgcgtttaatttgataattggttccgttaacggtaacggtcaaatcgtcttttttcttccagttatctttaattaatgtcacagggacaggttcattataaaattgttcaagttcatctgtaacagtttgttttgtatttgccatgtttacctcctaatagctgcaagttgtttcaactctaaccataaactccggagagagtatttctgctgtctgagttgctttccatccgacagtgcttctctggtcgagagggtctccggttcctgcgcttcccttctgtttgattattgtctcaaggccgccgcctgttatattagtaaccccataagcattctgaccaataaatagagtagagtatacgtccctgccatcctttccggctcctgccggatatatagttgttccaggaacaatagtagcgcttggagtttcagacagcgtgatgcttgcgcttcctgcgcttccggctgccgctgaggtgatagagtagtcaaatccgtttatctgtacagctttgccggacagagcagcagcgtcctttgcggctatttcttctgaaacagtaatggttttaccgttaacctttgcaacagtaaggctttcagggtctccggtctcgatgttttcaacggttctgagcggagctgccctgaatattttagcttctgtggactcaacgaatacaacgccgtgaattttgcctattgtgccgttgtaccaatcttttgggtcaacattctgctttatctctttccagtccgggtcgtttgtcaaatcgttggcaacatcagggtgaattatagccacgtaacagccgtctttcattggctgggcgttatttcgtttcagtgttgctacagctcttttaacagccgccacatttaaataatcgttatcctcatagttttcagcaccgcctaccagcagatttcggtcagacttgccgtttccatactgcacgttggttccggcatttaccttttctcttattactgtgtcaagagttcttcctgcctgatcgcctaaaacattttgtgtttctactataacgttgtcaatagcggacagggttaatatgtcagagagtgtaacataatcaccgtattggtcaacagtggattcaactgttgtgacattgagctggttgccctttggcgttactccttcggttaaaggtttgagcgctttaggcagcgggctgaatctgcggaattcaatagtctttcctgaaccctttgggataggcttgttctgtccgaactgtccatgaaccagttttgggctggcaaacctaatcatctgtctgtcgtaatacgctttcaattcaggagtaacgttatttccaagattattggttgatgtagtttgtgtattataatttatactcatttattatcctccttgtgtttacttattttataaactcttaaaatgaaattttttcaccgtttctgactctcttaactatttcgtcaagctcatcgtcagttaattcctcagggttctttttaaccatagctccgcttcctgccttgcctgtaccgttctcggtgattcgcctttcggcggacggcttttctccgcggctgcggtactgggaatcaccgtagttctgttcttccctatgacagagatagtaggcgtcttcaatgcttagtccatttccccaaacataattgcagaatttagggttttgtatttcacgtctcatatcaaaattaggatttttttctgaaaattccttgacctgagcgtcaatttctgaagttcttttattgatataatcctgcaaatcctgctggtcttcaccgtatccggcaaactgccccatttgctgggcgttttgataaccgcctggatattccgccgtttgaggctgacccatttgggtgttttggtaaccgccttgataacctgccgtttgtgactgcggtggggtatagccgtttccttgttccctatatccgccggccgccggcctttgtcttttgtttccgaatccgagcatatttttgctcctttcatattttattttgtggagattaagtgtcttccacaattaaaattataataaaaatatagtgcaaacgcgtgccattaaattagtgtacattattactaaaaaaaatgtattttttcttctagaaaaggctatattattagtaaaaatgaatgaaaatgattataaatgcttgtttgtgaaatatttatgaccgaaaacgcttgacaatgattgaaaatggtgataatattacggtgtaagataaataaatgaaaaatgaagcttaaaaatcaaatcttaaaaatgaaaaagaggggttgacaggtcatgcttacgcaggagcgtcataataaaatattggaactgctcacaaagcaggatacggtcacagtcggcgagttatcacaagggttagaaacttcagaatcaactatccgaagggatttggtaactttagacaaaatgggcaaggtaaaaaaggtgcatggaggagcggcggctattcatagggtgagcactgtttttgaagaggatgtcactacaaaatcagcactgaatgttactgagaaggaagcgataggcagagttgcagccgggcttgttactaatgatgattttgtttttatagacgccggaacaacgacggcggcaatgattgattttatttacgacaatgtcagagccacttttgttactaatggtatagttcatgcaaaaaagcttattcaaaaagggcttaaagcctatattataggcggacagataaaacttacaaccgaagcggttgttggaacagaagctataaataatttgagaaaatataattttacaaaaacttttataggaacaaacggtatcagtgttaaaggcggatacagcactcctgatgttgaggaagctgccgtaaagtcagaggtattaaaaagagggagaagcaattttattttaggtgaccataccaaatttgacaaagaatatgcggtaacatttggtatacttaaagacgcttgtatagttactgatgagcttgaggataatgaatttagggaacacgcggttgttaaggaggcttttgcatgatttatacagtgacatttaatccggctgtagattatgttatacatctggaagatatagaacttggcgctgttaacagaaccgagagtgaagagatattttttggaggaaaaggcataaatgtttctactgtgttaagtaatttaggcgctgaaaatattgcgcttgggtttatttcgggcttcactgggaaagctattgagagcggtcttaataaaaacggtataaaaaccgattttatagagcttgaaaatggtatcacaaggataaatgttaagataaaatcaaaagaagagactgatataaacggtcagggcccggttataagccatgaggcgatatcagggcttctagataaactaaaagttttgcagagaggcgattttctgattcttgcaggaagtattcctgcaacaatgccagatgatatatatgaaaaaataatggagcgtttaaaagacagcggttccaatattgtagtggacgcaaccggagatttattaaaaaatgttctaaagtatcacccgtttttagttaagccaaataaccatgagctgggagaattgtttggaattgaaattaatactgaggaagaaattattgaatatgcgggaaaactcagacagctgggggcaaggaatgttttggtgtcaagagctggagacggcgctgtattgtctgctgaaaacggtgaggttataaaaatgggagtgccgagcggtaaggttttaaactcagtgggcgccggagattctatggtggcaggatttatttttggatacttgcagagcggagattacagagaggcgctgaaactgggaactgcctgcggaagtgcgacggctttctccgcaggtttagctgaaaaagagaaagttgaagaacttatgaaaatcttgtaacttataaattataaatttttatataataaagaaaaggagaggtaaatatgaaggttattgatttgctgaagccgaacgcaatcgcgctaaacttcaatacggattccaaagaagctttgtatgataaactaattgacttgcaaagcaaagccggaaacatttcagacaaggcccagtataaaaaagatttgtttttgagagatgaagagggacctactgcaattggcgatggagtggctattcctcacgcaaaaagtgccgctgtaaagaatccaggattagcggctgtgacagtgcctaaggggattgaccttgacgctatggatggtggaaaatctaatttgatttttatgatagccgcaccgaaatcaggcggagacgttcatcttgaagttttatccagactgacggttatgctgatggacgaaaagtttagacaaaaattgctcagcgcaacgtctgcaaaggaatttttaaagtatattgacgaaaaagaaattgagaagtatggaaatgaacagcctaaggaaaaaacgcaggcttcaagcagcacaagcaaggggattaaaatagttgctgtgacggcttgtcctacaggtattgctcatacatttatggccgctgaggctcttgaacaaaaggccaaagaaatgggagtagaaataaaagttgagactaacggcagcggaggcacaaaaaatgctttgacaagccgtgatattgctgatgccgacggagtaattatagcggctgacaagaatgttgaaatggcaagatttgacggaaaacatatcgttcagactacagtttctaatggtatccataagccggaagctctaatagagaaaatagttaacggtactgccggtgtatactcacatacaggaggagctgagactacctcagaaggcggcgacggagtagggcactcagtatacaaacaccttatgaatggtgtttcacatatgcttcctttcgttgtaggcggtggtattttgatagcgctggcattcctgcttgacgactattctatagatccgtcaaactttggtatgaatacacctgtagccgctttctttaagacggtcggaggagtagcgtttaactttatgcttccaatacttgcaggatttatcgctatgagtatatctgacagacccggtcttgcagtaggttttgtaggcggagctctggcagtggcaggaactacgtttgcttcacttatgaatcctgacgtaaatgtagtatcagccggatttttaggcgcattgttcgccggttttgtgggcggctatttaactctcggacttgagaagctttgctctaaacttccggagtcacttgagggtataaagcctgtgctgatatatccgttaataggtattttggtaatgggactgataatgttcctcttcaacccgataataggtggattaaacacattgctgaatagtggtttaaaagcgatgaacggcgccagcaagatagttttgggattagtgttaggcggaatgatgtctattgatatgggcggtccatttaacaaggcggcttatgttttcggaaccgcttcaatagctgaaggcaactatgacataatggcagctgtaatggttggaggtatggttcctcctttggtaatagctctttgcacaactttctttaagaataggttcacgcccagtgagagaaagtcgggagctgttaactatattatgggtctctgctttataagtgaaggcgctataccatacgccgctgctgacccgcttcgtgtaattccctcatgtatagtaggaagcgcagtttcaggtgctttgtcaatggcgtttggttgtactcttatggctcctcacggaggaatatttgttttcccggttgtaggaaacgtattgggatatatagcagcgcttgttataggttcggttgtgggagcgctcctgctcgcatttttaaaaaagcctttgggcgaaaaagccggattagttaaaaaaggtgataaagttacggtaaaataatttaaattattattgacattgctaaaatatagtgataatattatagtatatttagtgaaaataattaaaggagtgtatattatggtttcaaaaacggttactgttacggatcctgaaggtcttcacatgagaccggcaggagtgtttaccaaagagatgtcaaagtttgattctgatgtgacaataaattttgacggaaagagttttaatggaaaaagcataatgaatgttattgccgcttgtataaaatgcggcagcgaaattgaaatagaatgcagcggaagcgacgagactgaagcgctcgaaaaggcggttgagctggtgcagtccgcagggtaggtgatgaaatgttcaagggaatagcaggctcagaggggattggtataggaaaagtcgcaatgataaaggagcaagacttgacctatgagccaaaatcaaaattgtcggttcaggatgaaacagctcgttttgagcaggcggttcaggaatttactcagagaactgagaaaatggcagaagaaatgcggaataatgtgggtgataaagagtctgaaatcctgatgggacatgtgctgatgatcagcgatcctgcgatgacagatgaagtcaaggaaggtataagcggcgggcttacttccgaagcggctacagaacaagtttttgagggttttgcctcaatgtttgaggctacgggagacgaattgactgtccagcgtgcagcagaccttcgtgatataaagactaggctgattaaaactctgctgggggtggaagaggtgaatataagcgcccttcctgccggcagtgtgatagttgccagagacttgaccccatccatgacggccgggataataagggagaatatctcaggtataatcacagaagtgggaggaagaacttcacactccgcaattttggcaagggctcttgagattcctgcagttttaagtatagataacataacaaaagaactcattgacggtgaagtggtaatagtagacggaacggacggcagcgtgattgcttcgccgggttctgaagaagtagaaaagtaccgggagcttaaaaagagttttgatgatgagaagaaagagcttttgaaactggcgggcaagcccacagtaacagccgacggcaggagagtagagcttttgtgcaatattggcaagccggatgactgcgctttagttattgagcgtgacggtgaaggtgtgggactgtttagaactgagttcctatatatggacagtaaagaacaacccggtgaggagcagcagtttgaagcttataaaaaggccgcaatgactctgaagggaaagcctgtaacaatcagaactttggatgtcggaggcgataaggatattccgtatttgggcttggaaaaagaggataatccttttatgggatttcgtgcagtaagatattgtattaagaatcaagacctgtataagactcagctgagagctctgatgcgtgcaagcgccttcggtgatataagaataatgattccgcttgtcacttgtgttgaagaagtcagagctgttaagaagcttgtagctgagatagcgtctgaactggatcagaacggagtggcatacaataaggacataaaagtcggagttatgatggaaactcctgccgccgctgtaatagctgaccttttggcaaaggaagccgattttttcagcataggcaccaatgacctcactggatatacaatggctgcagacagaggaaacgctaatgttgcttacctatattctgcatataatccggcagtgcttaggaacataaaaagtattatatactgtggaagggcagaaggtattgaggtaggaatgtgcggcgaagccgcttctgatccactgttgataccgcttttggttgcttttggactggaagaatatagtgtgaatccggtttctgttttgtcaacaagaaatgaaatatcaaaatggtcagtaaaagacgctcaaaaagttgcagaagaagctatggcatgttctacagaagaagaagttagaaatatcctgacaaaatatagaagataataagatatatacttatttcttatattatatatacaattaataaattgtatttatttttaaaagccgcagaaatgcggctttttttctcatattggctataaaatattaaaaccgcgcataaactgcattattgtaatgtagtttaaagtaaatagcaataaactatatattttataggtgaaattttagttgatttatataaataatgtgatataattaaataaagttataatggggtatgtttatacaattaaatttttctgagtgctatgccatgaactcaaaaaatttttttgtttttaaaataaagtataaagttattcaataatcgacatttctttttttacaatagatattttgattagaaatataattgtagattgattgcgtatttaatagaatgattttcaaaacgtcaggagtgagcagctaatgagagatatgaaagagcagctgagctattgtaaaaaaagacattcatttaagtttggcggtattcacagagtgtgtaaatctgttggtgcatgggcagtaattttatttatctttctttcatattgtccggctgtggttgctgaagacgtggatgagacagttttgactgttgcgtttcctgtcagtccgggaataaatgaggtttatgaagatggaacttatggcggatgcgtttatgattggcttagagaaatttctaagtataccggctggaaatatgatataaaaaccgcagatgaatcaaatgatgaagcgaccactgaattactggacggaatgattgaaggaaaatatgacatcatgggcggaatgttttatcaggaggaatatgagcagtattttaactatccgaaatatattatgggttcaaattattcactcttgatgtaccaaaaggataacagtgatattaaaggttatgattacaacactcttaacggtaaacgcataggagtttttggcaaagccgccagtaaaatagaacggttaaaaaagtttattgaatataataatttaacttgtgagcttgtgtattatgatgatagggaattatacgaaaaatgtatcgattcgggagatgtcgacctgatttacggcagtgacgtatatatgaaagacgggtataatgttgccgttaaacttgacagcgacccgtattatttggttacgtcaaaagataagcctgaattatgtgaacagttatcaaaggcgatggaagaaatttatgctgcgaatccaaattttgcagaggaactctataataaatactttcctgataaatatataaattccataacttttactgatgaagaagataaatttataaaggaatgcggaactttaaaagttgctgttataagagaccgttatcctctgttttatgagagcgatgggaaaaaaagcggaatcgtaccggaatgtttgaaactaatttctaatcggacgaatcttgattttgaatatgtgtatgctgatacatatagtgaacttgttgaaatggcagcatccgggaaagcggatataatcggagcctttatgaatgacgatacatctgcggatgatttggggcttataagaactgccggatatgctgatttagactcaattattttgagaaataaacaaagttttgacaagcaagacggtcttacgatggctgtacccgaaactctatccttaaagactacgggaaaaaacgattctattatcaggtatcctaagtatgaagactgtatggaagctgtaaacaatggcttggcggattatacaagaatgcctgcttcttttatagaaggtttttatacaaaggattattatgctaatatgactattgtagcggatacaaatattcaggaaacactgactctagcaatgaaggctcctgcaaatgttcaaatgtattctgtcctgagtaaggctgttaatagttttagcgatgaggatacagcccatattgtgtcacagccaaatttaagtttacctgacggtgtagttacacttaaaactgtcctttatactaatcctgttctcgtgattggtatatgtgtcggttttgtgtttattttgtccctaatggctgttttgtttatattttacagtatgcgtacaaaaatgatggctgtaaagcttgaaaaagcggaggagaccagccgggcaaaatcagactttttatccagaatgtcgcatgagatacgaacgcctatgaatgcgataatagggctgacgaatttggcaatattaagcagagacgctacccctgcattaaaagaggatttaaataaaattgattcatccgctaaattccttttgtctattcttaatgatgttttggatatgtctaaaattgaaagtaaaaaaatgacggttgaaaaattgccttttgatatgtatgaattaattgagcagataaaaattatgttcgtcccacagataagcgagaagaaattaaattttgacgtaacttgtgaacttgaagatacatgttatttaggggataaaatgcgtattaatcaggtgcttgcaaatttgatgtctaatgcttgtaagttcaccgacagaggaggcagtgtttggctgtcagttacagagtcaaaaattaacgagaatgaatcaaagcttagatttagtgtaaaagacacaggtgtgggtataaatgagaaagatattgatagggttttcaattcttttgaacaggcggaaggaagtaatttaagagctcccggaacaggactaggtctttctataagcagcagtcttgtaagtttaatgggaggagatttaaaagtaaaaagtgagcccggcaagggttcggaattttattttatcatagaactgccaatatatagtggcaaattgagtgaaccaaataacgtagctgataaaacaaaaaatattgttttagatgaaaatattttgaaaaatatgcgtgttctgttagcagaagataatgatataaacgccgaaattgccacagagctgttaaaaatgaagcaaatatccgtggatagagctccaaatggacaggaggctgtcaatatgtttgcaaaaagttcggacggcgaatacagtgctattttgatggatataaatatgcctgaaaaagatggattgactgctgcagctgaaatccgcaaaatgaatagaaaagactcggctgaagttcctattttggcaatgaccgcaaatacatttaaagaggacagagagaaagcggcagaagctggaatgacagggtttttgccaaaaccatttgacgctgaacagctctataaagcattaagaaattcaatcttaaaaaagtaaaaattaagcccgctgcctaatggctgcgggcttttttcgtggagccgataagcggaatcgaaccgctgacctattcattacgagtgaatcgctctaccgactgagctatatcggcaacaacgataaatattatatattattttgtttaaaatgtcaagtgcaatttttagatgtcaaaatcagcttattttagaaatttataaagttattcgtccagcttgtctttaacatagttggacacaagctcttccaagatttcatcgcgttccagtttgcggaccaaacttcttgcgccgttgtatgacgttatataagacgggtcacctgacaaaatatatcccacgatttgatttataggattatatcctttttcagacagcgcttggtatacagacagtattatttttttagggtcagcacgttctgtttcaacattaaatttaaccgtttcctgattttccatagttttcacctgcctttatattaaatatattatattgattatctaagttcagcgcctaagcaatttttaagtttttcgagtatattatttaggacgtcatttatttcgttatcagtaagtgttctgtcaggagctctaaaggttagagaatacgcaacgctctttttattttctcctacctgctgtccttcatatacatcaaagagtttataactttctaaaattccgtgttttgtgtcatttaatattttctctattttgccaacgcttattgacttatctataaccagcgcaatgtcacggtttgaagccgggaattttggaagagatttatattctctttcgaatgttgaaaattccattatggtgttaaaatccagctctccgcaatatatatcggtgtccagcttaaagttctcggctatgtcagggtgaagctgaccgattgttccgataatttttccacccgcgcatattttagcacatcttcccggatggtatgccggcgactctgtgtcggcttcaaactcagcgtttttgataccaaggtcatcaagaagattttgcactattcctttaagatcaaagaaatctacatcgccgtacatacccagagccacaacaattttctcatcgggaagtttttgattttcaaccggaatataggtcatacccagctcaaatatttttgctttcggaacccggcggttataattaatctttaaagttttgattaccgacgagagcatattggttctcatgatactgttttcttcgccaagaggattgattattttgacaacattatcggccggtacctttgtcatttcaaattccttagggtcaataaaagagtaagtcatggtctcatacataccatatgcagtcagaagctctcttatgcagtcttcggttttttgtttaagtgtttttccgccgattgttactctgcccttcatcatggtagtaggaagattgttatatccatatattctggcaacttcttcggctacatccgccattgtttcgatatctccgcggaatgtcggaacttcaacatttgaaccgttaacctcaaattccagtctttttaaatattcagccatatcagaggacggtatatcagtccccaaaaatttgttcattttttcaggttcaaaaggcagaactgttttagtctttttgattggatatatatctatacagcctcctataacttccccggcgcccatttcctcaatcagttcacaggcacggtttatagcgtttaaacagttttcagaatcaagtcccttttcaaacagagctgaagcgtcagttctcattcccaaggattttgctccacgccttacaagtataggattaaagttcgcgctttcaaacagaacggttgtggtagtatcggtaacttcagtgttggctccgcccatgactccggccacgcctattgcccttttttcatcagctattgttatcatacctgatttcagttctctcggctgttcgtcaagagtttcaagcgtctcaccgtctgacgcgtctctgactattatttttttaccttcaatattatctaagtcataagcatgcatcggctgaccatattcaagcatgatatagtttgttatatctacaatgttattgatagacctaagaccacaagcagtcagtctgcgctgaatccactggggcgatgggccgatttttacattcttaacagctcttgccgtatagcgcggacagatggaggggtcggcaatttcaacctttgcataatcattaacgtcttcattgtttcccgttggttttatttcaggtattttgaactctctgttaaaggttgcggcgctttcgcgggcaagaccgatgatgctcatacagtcaggtctgttggaggtaatctcaaattcagcaacgctttcgttaagacccaaagtttcggttatgtcctcgcctataggtgtatcatccggtaaaatcagtattccggaagcacgttcctttgaaatgcccaattcatcagttgaacacatcataccataactcataacgcctcttagcttaccctttgtgattttaataccgccgggaagtgtgcttttatgttttgcaacaggaacaacagcgccttcaaatacgttggaagctccggtaactatctgtatatcctcgtcttctccgacgtttacttggcaaacaaccagcttgtctgcgtctggatgtttttcaattttgtctattttcccaacaacaacgttcttaaactctgcaccggggttttcaatgccctcaactatagaaccgctcatggttagtttgtctgcatactctttctcgctgatgccgtctgtattcatataatcctttaaccaggataatggtaaattcatacttgtttcctcctaaatattagaacattggttctcagtaaacttctgaacctgcttcgggtttttaaatataagtatttgtttccccggatatttcctgccggcttcatcaagacggcggaggtatttttttctgtttttccttcctttgtgaagtacccagcttacaaattcaaaatcaattttttcatcgcagcctttacccatatcttcacgggttctgcctttgtagttaaaatagcgtttgagtattcgtttaaaacataaaaatcggttaaagtccaaaaatataatagtatccgccagctctaatcttttatcatatagaacctttgaataatttccatcaattacccatttatcttgattcagcacattttgaagagtctcagactcaatttcaggagtattttccacccagcccggaagccagtggagcgaatcaagatgcgtaggggtcgtccctattttattagctataaaccgagccaaagtagattttcctgcgcctgaaaatccaattatcattacgcgtttcatgattaaaattgctttaagaacccgagatcgttttcatagaacaatcttaaatcgtctataccatatctgaacatagcaacacgctcaagacctattccaaaagcgaaacctgagtatttctcagggtctatattgcagttagccaaaactttgggatgaaccataccgcatccaagtatttctatccagccttcgcctttacatattctgcagccttcacctttgcagttaaagcaagatatatcaacttctgcactaggttcagtgaacgggaaatgatgaggacggaatctaacttttgtgtcctctccataaagtctctttataaacacttcaagagtaccttttaaatctgccatagttatgccttcgtccacaaccagcccttcaacttgatgaaaaactggtgagtgtgtggcgtcaaccgcatcgcttctatatactctgcccggtgaaactatacgtatggggggctgctgtttttccataactctaacctgaactgaagaggtctgtgttctaagcaaagtatcttcattgatgtaaaatgtatcctgggtatctcttgcagggtggtcaggcggaagatttaaagcctcaaaattatagtaatccagttcaacttcaggaccttcggctatagtgaaacccattcctataaatatatcctttaagtcatttaaaacagtagtaatggggtgtttttttccgtgttcaggtctgttgccaggcagacagacgtcaatggtttcagaagcgagttttttgtcttttgccagctttatgagagctttactcttttcctcaagtattccttcgataaagcctctgacctcattggctaactgtcctataacagggcgttcctccggcgtaagtttgcccatacccttcatcagagatgtgagctcgccttttttgccaagatatttgactctgagattctcaagctcagtcaaatccagtgctttttcgagcgctgactcggcgctggttttgatagcgctaagctgttctttcatatatataatacctcccatataattatacaacgttatttcaaataattttaacacacaattcctaatatttcaaggcttttaaggtattttttaagtatgcaagtttattttactgtgattttagcttgtgttttatacggttttggtgtattattattccaatagataccttagggggaatcataaatgaagaatattttaaaatttgccggtgctgtgattgtagttctgatgtcgtgtataacattagtatttgcggcgggacaagcccagccggaagtaacggtgaaaaatcaaaacggattgacattaagaaatgatgttttttcgtactcagataagtttataacaagtgaaattaagaatactgacagtgcggattcttctgaggtgctattaatggcagcgtatgatgaggaagataatatcataagtatcagcagtaccggtgatttaaatattgctccgggggaaacggcagaatgcgttcttagtttggacagtgcagatagaactgtaaaatcagtacgagtctttgtttggagagattttgaaagtgcagaacctatttcggagacgatagtattcactaacgaactttatacttacagagatgatgcaaattcagtttttgtatctgttgaaggaagtgattccgacggagacggaacgtttgcaaagccattcagaacggttgatttcagtgtatcgaagctgtcatcgggtaaaactctttatattatggaaggaacctataaagaaaatatatatgtgggcgtaaaaggcacagaggcagagccgataacaataaaggcggctcccggcgcgcatgcggtgatagatggaggcggaaagctgaacgagaatataattgaacttgaggcttcgtcaagcgatattataatatcagatttagagcttcaaaacggctggggcggaatatacagcgaaaattcaacctctaaatcaggaaagaattttgtggtatgcaataataaaatacatgatatagacggcaataatgacgatacttttgcagtggtcttttatgctaaaaatgtaaatccggtaacaaatgtgattattgacgggaatgaaatatataactgcaaaacttatacgagtgaaacggttactctaaacggaaacgtggatggtttcagagtgtctaataatataattcatgattgcaataatataggtctcgacgcgataggctatgagggaacatgcaaaacaaaagaactggactgtgccagaaacggcgtgtttagagataatactgtttataatgtttcaacctatggcaatgagggttataaagatggttcaggttacgacttgtgctgtgcgggaatatatattgacggaggtcatgatattgaaatattagataataatatttataattgtgatataggagttgaagtagccagtgagtctacacgggcgccgtataatatatcatataatgtgtctgtaaataataatataatttctgagtgcaagggtttggcaggaatttgtttcggaggttatgataataaggttggctggacaaaacagtgcgattttgttaataataccttatataataatattgtcgggataatggtgcagcaggcagaagataatataatatcacagaatataatttacggcggagagaatggacttgtattttcttttgcagacgaggacggaaaacttgtttataaaggtgttggtccgtataatgacactaacaattttggagcaaactattggtatgacccgaatagtgtttcagggtataactgttggtttgatatgcttccggcggaacagctttctaaacagataaccggtgtagaccctaaatttaagtctcctaagcagaacaatttttctactgaactgaatgcgctgggttatggagctataagataattttaaataataaaactataaattatgtcagaaagatggagagatgatgaataatattttaatgtatgtatggcttttggtgggttttttcttattaataaaaggagcagatttgtttgttgacggcacttcatcaatagcgaagcttctaaaagtaccaagtataataataggactgactattgttgctatgggaaccagcgcgccggagatggcggtaagcgtgggtgcagctataaagggtcaaaatgatatagtaataagcaatgtgctgggttcaaatatattcaatcttttggtagtggcaggaggctgtgcggtcataaagagtcttccggtgtcaattgatttgcggaaaagagatttcccgttttctattggtatagctgctcttttgcttttcttttgtttaaatagtttgataattgggggaaaaggttttactatcaacagaacagaggggataattctttttgccggacttatggcgtatcttggatttttagtatactcagctgtaaagggcaggacaggccttcccggagacgaagaaataaagacaatgtcgcctcttaaaagcgttttttatacagctttaggtattgcaggaatagtggtgggcggagacttggtagtggattccgcaagtgatatagccgccgcttttggtttgagccagacaataataggactgactattttggctgtggggacatctcttcctgagcttgtgacttctttggtggcgacgcggaagggagaaaatgatttggcaatgggtaatgttatcggttctaatatttttaatatattaggtgtgctgggattatccgctgctgtcagtcctgttaaagtttcgggattctccgttatagatttaagtttgttcattggattctgcctgataatttacctggttacgttttttaggaacaagatagagagacttccgggtattttaatggtgttgacatatcttggatatatgacatatgctgttatgcgtgaagtattttaagtaaaataaatataaggagagatttcatgaagagaaaaacattttatattatagcaggagtttggtttgctatgatagtcttgatattgctggcttgttatactccgattgttgacccagtaactcaggaagaagtaaaaaagtacatggttttggcgatttgtgtaggagctttggcgcttatgcttattagaagaaaggtaaaagacgacaatgacaggagttaatggccttttttagagattaatatctccgaagttacagcgatataaaaaattttatatatttttcttattagggaactgtttatgacaaattttgccttgtaacttgtttataatactttcgtaatgaaatgttaatgcggttacggaggtatttattatgagaaacacagaattggtgtctgttgagacttctctgcaggtacagcaaaaaaagcggaaaggaatcgatttaaaattttgggatattccggtgcggcttttgggcttattgtttgcgggggcaatgcctataagcggaatggcaccgtttggtttgtcttttttgacgcttgaccgaaagttttcactaaaaagcgtcattaatttgatttttgtgtctgttggctatctgcttctttttgattttgagcttgctttaagatacatatctgcttgtgttatttttgagacggttttattcgttatagaaagaaacgaaaaaccgtctttgtatttcgttgctattgtttcagcggcagcattgtttctttgtgagtttggcgttttaatgtggacaggctttacggttgcaggtctaatacttataatttgcgatacaatgcttatggcagtcggagtgatggtgtttgatagaagtagggatgttttgcttgaaaataagtttttgtcgcgttcactgctgacagatgaaaagataagcttatgtataatggcaggtgtgattttgctcagtacaaagtcaatcactgttttggatacgtttaatatatctaactttttggcatgcgttttaatcggggtagtgtctttgtcaagacatggtctgactcatggcgccgttgcgggaatatgttccgggattatattaggaatcggcggtttatttccggagtttgtggcagtactcacaatctgcggcctgctgtgcggtatttcagctcagttcggaagaaaggttgtttgcctttgtcttggtgtatgcggtttagggataatgctgtatatgggtatacccggcggacaaacgcatataccaaatatatatgagttggttttggcggcggctgttgtgtactttcttcccagaaaggctgttataataggtgagaaagtaactgattttaatgttgacaattcagacgatactgagcgttttagaatgtatgttactgaaaaacttatgtgtatatctgattcgttctatgatatttcaaagacatttgattcaatgtcggacaagcagacaggcatggatatgagtgatatctcgctgctgtttgacacggcggcggatagagtgtgtaaaaactgtgagagagcgaatttttgctggaaaaaggattttaatgctacatatgcagctatgtttaaatttttggagataatggagcggaaaggcagtctgcagctcagtgatgttccaaaatgtttttcggacaagtgtgtacacctgctcccgcttataactgaaataaacaggctgtttgagatttataaaataaacagaacttggaaaaataagcttcaggagaacagagagcttacgagcgagcagtttaaggggatttctgaaataataaagaatgccgcgtcggaaatatgcggcgaaaagagttttgatatcaggtcggcggatgaaataaaagaagttttaaacgatatgggaatttcagcccagcgagttaacgttgtttgtgacaagaatggaaaatatatggtagaaatcagcgtgcttgactgtgatgatttctcagtttgccaaaagagaataaaacccgtaattaaaaaggtccttggaatcaatgtggctgtgccgtataatgagtgtgatacctcagacagcggaaagtgctgtatacgtttttgccaggtagaaggttttgatcccagtattggggtggcaagcctttcaagtaacggagaaagcggagacaagcactatacgaactatttgagcggcgggaaactggcggtaactataagcgacggtatgggaacaggacacaaggcggctatccaaagcgacgctattgttaaacttttgggaagctttttggaagccggttttgataagacaatagcagtcaagctggttaattcagtaatggtgatgaagtcagccagggatgcttttgcaactgtggatatgtgcgttatagatttgtatactggtgagatagaatttatcaaaaacggcgctgaagccagttatattaaacatacagaatatacagagactgtgcgcgcggcatcattgccaataggaatagtatcaatcggcgatattgagacgtttgccaggactttggaaaacgggtctatggtagttatgaccagtgacggtgtaatatcagcggcggaagacaattggattagggaactggttgaggtaatagacatggagataccgccaaaagaattggcgcagataatactagacgaggctgttaagagaaatgctgaaaatggtattgaaaatgatgacatgacagtaatatgtgtgaaattgtctgacagaagagttagagcagagcagaagcatgtgccgaaagcggcagtaatgtaatgatatagtttataaaagccgattcagatttgaactgaatcggcttttaaaattcgtttattaataattgaaaaaataatacattcatatattaataaaaaagaaaaacataatttgattaacaattaaaaaccatatgaggtgtgtttagctaataactgtaccgtataagatgatttacatttgaacacaaagtgtttaaaataaaagagactataaaaacataaaaaataaaatcaaaagatcatcagttaagaagagcatcggcagggtgcatttatgcaccgcgtgaggcgagcaatcatctgaacatgaagtgttcaatatataactcaatatttattcttaataatcagattaataaatataatattatgaaaatatatctttatacaatcggtaagattaattgacaatgtttttatcttatgttatcataacttcaaaatatatgactagaataaatatttttccgtgttatattagtaaactatatattaatttcagcgcagttttttaggaggctattttatgcttttttcttttgatgatataatggaatatgtggaggaaaacgacgtcaaatttatcagacttgtattttttgatattttcggcagtatgaaaaatatatcaattatctcgacagaacttccaaaagctttggagtatggcgtcacttttgacgcttccgaaataaatgggtttatgaatattggcgaaagcgatcttttgcttaaacctgacccttcaaccgcagaaattttgccgtggcgtccacagcaggatagggttcttagaatattttgcgatatttgttatcctgacggcagaacgtttgagggcgattccagaaatattttaaagcgttcggtagactgtttgaaagagctcggatactcgtgcgatatcggttcggagtgtaaattctatctttttgagttggatgaatacggaaatccaacaaacaagccgcatgacaacggcacatattatgatgtggctccggtagacaagggagaaaatattcggagagaaatttgtcttacgctggaggaaatgggtattcaacccgaaagttcgtatcatcaggcaggccccgggcaacacgagatagtttttaaatatggcgcaccggtagaagcagcggatcatctaatgacatttaaaaatttggttaagacaattgcgcatatgaatggacttttcgcttcttttatgccaaagcctttgcaaagacagaatggaaatggtatttttgtaaatctttcgctttatgatatggacggaaacagcgttatagattataataatgagactggcagacaatttatggcaggtatacttaaccatattaaggagattactctatttttgaatcccttaacgaattcatacagcagatttggagagtttgaagctcctaaatttataacatggtcacctcagaatagacagcagctaatgcgtataccaaagaatttggcaggagactgcagacttgaactccgctcgccggacggcggagcgaatccttatcttgtttttgcattgatgatttatgccgggattgacggaataaaaaacaagatgattttgggagaacctgtaaacgtgacctataaagaagacatagaaggtcttgaatgtttgcctcaaaacttagagacggcagtgaattatgcgaaggatagtgattttctgaaaaatgttttacctgaaaatatcctgtctacttatattgaaaataagaaaattgaatatgacaaatatgtcaaggcgagagttaaggagcaatatgaacgcgatttgtatttcggctctatataataaaatttaccattaattatttgggaggttatgccgttgtacaatagaattcttatagtttcggcatctcaaaagagcggagacgcgctggctcttatattgagacggtttgctatgaataacatagattttgcgtcaagcggagttgaagccagacgtgtagttttgcgttcatcatatcagcttgttatcataaatgctcctcttaaagatgaacagggaagctctctcgcttctgattttattcacagcacacattcatcagtaatattaatagctaaatccgacgttgcggatatgcttgcttcaagagtggagggagacgggatatttgtaattccaaaacctttgcagcagagaacttttatgggtgcggtaagattagcactgggattttcaaacagatttattgagatggagaaagagatttcaaaatatgaaaagaagtatgaagaattgcgaatggtttccagggcaaaatgtgttttgatagaaaaagagggatacagtgaaaaagatgctcatagatacatagaaaaacaggcaatggacagccgggaaagtaaggcaaggattgcagaaaatattataaagaaatatttgtaatttttatatataaaaaacagcttcacaataatgaagctgtttttgtttttattaactttatacctgaggcgaatcaatggttactgtttgagttgcctcatcccatccaactgtatagccaaatgcttcagccaggaatctaagcggaatatacatacgtccgccaataccgtcatattgtttaacaaaagcagttgtatccattggtgttacaacagtctgacccatgtcagaaattctgaatatgttataagaaccttcctgaacgatatacatttcagaaccatcaagaattagagcagcattagtattctcatcatacttaaccgtcttattcatagactcagaaacaaatctgataggaacgaaagttctgtcgtcctgctcaataatttcacccatttcagccggtatctctgcaacgtttccgttaataactatactttgagccgccgcaaaagccgcttgtgaaaagcttgtcaacacacatataactgctaaaaatcccgctagttttttcatataaaactcctccataatatattgttcattaattatagcataaccgatgaaaaatttcaagggtgtttttatagttttcagataagtcatttttttacagagcgtataaaaatattatagatatatttgtaaatcaatttaagaataaacggcattttatatgttgaagtttaatgattttaaatgatgttacggagtgaaatattttatatgttatattgtagtcgctcgaataaagtgtaaagaaatgtttaggttatatctaatataaaattatataaaaacgtatggggtataagcatcgtggagattgtgaccactcctgtaagataggtattattcacaattactttttatatttaaaccttggaaagactgcaacaaactagacagaaaggttaatggtgtttttagtgaacgttagtaggatatgctagaattcctaattgttattatatcacgtgaggcttgagtacacattttatatttactaaaatctttttataataaacttttccgcggctgcgcaccttacgcggcgtgcttcgtacgcccttccgaagcttgctataccgcattattctgaaaattttttagaattaatatcttaaaaaagtgttttttggtgaacatcggcagggtgtgcaaacgcacacctcgttaggtgagctgtcatctcacgcgaagcgtgaacatatataaaaaagtttgttataaacttttttactaaataaattattccgcggctgcgcaccttacgcggcgtacttcgtacgcccttccgaagcttgctataccgcattatttttgaaaattttttagaattaatatcttaaaaaagtgttttttggtgaacatcggcagggtgtgcaagcgcacacatcgttaggtgagctgtcatctcatgcgaagcgtgaacatatataaaaaagttggttataatcctttttactaataaatttttccgcggctgcgcgctttacgcggcgtacttcgtacgcccttccgaagctagctatactgcattattttgaaaactttttagaattaatatcttaaaaaagtgtttcttagtgaacatcggcagggtgtgcaagcgcacacctcgttaggtgagctgtcatctcatgcgaagcgtgaacatatataaaaaagtttgtcataattctttttataataaacttttccgcggctgtgcatcttatgcggcagatttcatctgccctccgatgcttactatgccacaatttcagacgttattgacatataaaaaaacaatatctattaatatattattttgaacaagtatggtcggtcacacctgtttggttttcaagtaaactattattacaatatagaccatttgtatattacaaaatccaatagagttatctgatattaaattttaaattttataatgaattgttttatagaatataaaatgcccgctttatatgcgggcattttgaatagtgtcttaagccataattactatttgattttcagaattcataagatatataatcaaatattggttaccattttcgtatacaacataggaatctttgccttgagcgtcaaactttgtctgtgagtatccggcgttttttaaagcgtcaagatacttgttataagcgtccatatccatttcatatttatagtaagtattgccgctgttatcagtctctgaagctgtcatagtttttccggtaacactttcaaatttgggtatagtagactttgcatagaattcatatgttccgtctccggtcggccactcataatctttgcttgaagcggaattgccgtttctgtcggttggaagaggatcgctcacctgtccgcctgaaccgccgttatttccgtttccataaccaccgccgttgttcccgggagttccgttgtttccgtttccataaccgccgttgccgcctgaaccattattatttccgtatcctttataaccgccgccggaatcaccgccgctaccattgttgtttccgtttccatagttataaccgccgccgtatttaccgaaataatcaccgtattgattaaaaaagtcaccatattcgtcatagccgccgctgtccgggatgtttccataattatgggcgccgtactgctgatgaatacggttatcttgtgctccatatctttgggttttaaaagtgctgtagacagaaaatccaataaacaccaaaacaactgcaagagatatagcggcaatcggtatagttatttctcttccccacagttttttatgattatttggctgataagaaataggttgttcaatgtatccgttctgtgcctgtgtaactcccaaattgtaagccgcattagtaaacggactttctgtattttcgaaatggtcattattgctttgatatgtggtgctgtccttcgaataagagctttgttccttttcgtcagatcttgctattgtgccgcaggcgtcgcaatatttggcgtcatccggtaatttttttccgcaattactgcaaaacattatcctcactccgttctaatttatttaataatattcaagtttattaaaaatctttcttataaaataattatagcatcttttatctaggaatgattacataattgttaataaattattatattttttagaaataattatactattgacgcgccgctttggatatcatcaagcgttgaggttaaaaccaatttaccgtcgtgttcggctgacagtatcattccgtttgactctaaacccatcattttgcgcggaggaaaatttgcaatgaagagcagattcttcccaataaggtcttcaggtttataatattttgctattccggataatatttgtcttgtctcgcctccgcattccagttcaaatctgagtaatttggaggatttaggaacttttttgcaaactttaactttgccgacccttatatctagtttttcaaagtcatcgaaggttaccggttctttaaacggttcaatttcaggttgagtttcctgttctgcaccgaattcttcagtaagttcttcaagttttttatccaaatctattctggcaaatataggcgtggcttctgagaccttggttccgggtttagttgctccgaagtttttaaggcttgcgtatgacaactcgtcagcaccggtttgttttgctattgcagaggcagtatcaggcaggaagggctgtagaagagatgtgatatatcttatcgcttctataagattatacattacggtttttagagtttcttttccttcgtctgtttttgcaagtatccatggtgttgtttcatcaatgtatttgttagaacggtcaactattttccaaatttggtcaagactgtctgaaactctcagtgtatccatagttttgacgattttttcactgcattctatgcaagtatttgaaagtgaactgtcaaaatcagtactgttgccgggagcgggtataataccttcgaaatatttattcaccattgatacagttctgttcacgagattgccgagtgtattggcaagatcagaattatatctgtttattaatatttcataggttatagttccatcctgagcgtatggcatttcgtggagcagatagtatcttactgcgtcaacaccaaaatgttttactaaatcgtcagcataaattacgttgcctatagatttgctcatcttatcttcaccgtttaaaagccaggggtggccgaatacttgtttaggaagttcaagacctaaggccattaaaatgataggccagtatattgtgtggaaccttaatatatccttaccgattatatggacgtcggcaggccaatacttgctgaactcaggcgaactttcatcgccgcggtagcctatagcggtgatatagttggtaagtgcgtcaagccatacgtatacgacatgtttttcgtcaaatgaaaccggtattccccagtcaaaactggttctggaaacgcagagatcctgaagaccgggttttaaaaagttatttaccatctcttttttgcgtgattcaggctgaataaagtttggattttcttctatatgcttcattaagcggtcttggtaattactcattttgaagaaataagcttcctcgtcttgtttatgaacttcgcgtccgcagtccgggcactttccgtcaactaactgagtatctgtccagaatgattcacatggagtgcagtaccagccctcgtatctgcttttatatatatcgccttggtcataaagttttttaaatattttctgaacggtttcgacatgatagccgtcagtagttctaataaatttatcatagcttgcattcataagatcccaaatttttttaatttcaccggcaacacggtcaacatattcttttggggttattccctcagcttcagccagctcctgtattttttgtccgtgttcatcggttccggtacagaaacagacgtcatagcccatatatcttttaaagcgggcaatagcgtcggtcaacacaacttcatatgtgtttccgatatggggttttcttgaggtataagcgatagcggtagttatataatatttttctttatcacacattataaatctctccttaagtttattgataaatataggatagacggtctatcaatctatcggtcaccgaagggtataccgaaatgttcgtacgcggaaggagtgacaactcttcccctgggagtgcggttaataaaaccaatctgcatcaaataaggttcataaacatcctctatagtatcagtttcttcaccgattgttgcagctagtgtttcaactccaacaggtccgcctccgtactgattgataaccgtcaaaagcattcgtttatctattgcgtcaagcccatggtcatcaatttccatcttattcaatgcgtggtcagccagttctttggatataacgccgtcttggcttagctgggcgaaatcgcggactcttttcagcaatctgttggctatacgcggagttccgcgtgaccgccttgcaatttcagaggcgccctcatcgtctatatctatattcaaaatacttgcacttcttttaataatagttttcagttcatttggtttatacatctcaagacggctgataacgccgaacctgtcccttagcggagccgccaaagcaccggctttggttgttgcgccaataagtgtaaactttggtaggtcaagccgtatggaacgggcggacggaccttttcctattattatatcgagagcgtaatcttccatagccggatataatatttcttccacacttctgctcattcggtgtatttcgtcaacaaataatatgtcgtcctgtgaaagattggtgagcagagccgctaagtcgcccggtttttctatagcgggaccggaggtaatgcgtatgttaacacccatttcatttgcgattatgcctgcaagagtggttttgccaagccccggcggcccgtacagaagaacatggtcaagaggttctccccgcatttttgcagcctcaataaagactttaaggttctcttttgcttttgtttgcccgatatattctgaaagaattttaggtctgagcgtgtattcaatttcagtgtcggcattggtttccccggtggaaactatgcgttcttcgttactgtcagttattgccatatgtttcactcgtttctttattcatcatgtcggtttatgtgtttgttatgttagtataaccgttcagtatactaaagtaggttttttaatccatattttatcatttcttcggcagaccctgttgctcctttcagtgctctgcgggcttcttcaggagaatacccaagaaccaccaaagccgatacggcctcgttatcgtcatccatttcgggagagaatatttcttcagccggcatatcggatatgtctgcatctttaaatttatctttaagctcgagaatgagacgctttgcgccttttggtcctaaacctggcgtgtttttagctagatattgagcgtcatcggtcacaacagaaagagcaaattttgagggagatatattagataacaaattagcggcggttttagcgcctattccgcttactcccaaaaccatttcaaaaatatttttttcctcctgtgtggcaaatccatataatgataatatatcagatgttgtttttatattcaaataggtgtataacttcgcttttgacccgatttcacccaaagcttccagcgaggggcgggtggaatatattctatatcctatgcctccggtttctattactgcaaagctgtcagtttttaatgccagttttccttcaatataatgaaacataattatcctgcctaatctttaaaattatttgcataaatttaattataacaaatatttcagtctttagcaagcccaaattacacagttttatgtctgtaaagagaaagatacttgtttggattgttcttgataaaatgagggctaattttatgttttaaaaaattacaaaacgggttttgatttgttaaaatggcaaatttacagataaaaccagcggtttttcggtattatatagagtggtttgtaggtttgtcaatgatgtgttacaaaaaagattaaaagagttcaccgaaattgataaaagagttgatgtagtcaatgggagctttccaattcacctaacgaggcgtctgccgccgccctaccgatgtttgctgaaaattatcttattttttatagttctcagttttaattatatcatttttttttttactactatccatttaaaacggagctgataattttcgctagaaatcgaaatcactcttatatattttttcttatcgtttatgatttatttatattaaataattaattctaattagttcctaaattacagatggttttatttttacaaatatatactcatataaaaaatattttctgcaagcaacggcagggcaaatgtaatctgcctcgttaggcgcgcagtagcaaattttatttatattaaataattaattctaattagttcctaaattacagatggttttatttttttttccgcgactgcgcgccttacgcggcgtacttcgcacgccctaccgatgcttgctataccacatttttataaaatttttatatttatttttattataatatgttcacgctacgcgtgagatgtctgctcacctaacgagacgcgcaagcgcgtccttccgatgttcactaaaaaactccgcatataagaaaatatttaaaataaaatttttatatttatttttattatatacctcaacttttctatgcactttattgtttcattttcaattatttccgtatatacagtgtttatagtgaacatcggtagggcagatgtatgtgatattatggtgatataactataacacaatttatgagttttccgtattctttttttctatttgtaacacatctattgtaatcctacatataatatataacaaattaagacaaaatatattgacttatagctggtaaaagtggtataatgtcttttatatgaattgaatatataactttatggatgtgataattttgagttttggaaagattacgcatactccggtaggacttgccgatgtattatgtgatgagtatgaacttaaactgcgtatagaaaatacagcttgtacagtttttaaagattatggttatcgaatggttcaaattccaacttttgaatatttcgatgtgtatagtgtttctaccccgactcaggcggaacatatgtttaagttttttgacaatgatggaagaatgcttgctcttcgccccgatttaactacctctgtagcgcgtatggcggcaactaagccggctgccggtaaattgccgcttcgtatttcttactgtggaagcgctttcagaaatgaggaaaatttcagtcaagcacgccagcgtgaattcacacaagtcggagttgaactaattggtgacaacagtgtaaatgctgatgctgaaataattcaaattgcaatagaaacatttttaaaatccggaattaaaaattttcaaattgatttgggtcaggttgaattttttaaaggtttggttgaacaagccggcttgagtgacagcgaaagcgatttaatacgcagtcatataaatgacaaagattttattgctgttcagtctgttcttgacaatttaaatattaacagcaatatgaaatcaatgtttcagaacctagcaacaatgtttggcggaattgaaattgttgataaggctctttgtgataatgacttaaaccaacgttccaaagacgcgttaaaaaacttgaaggatgtttattcaattctagttgaaaaagatttggacaaatatgtttcaattgatttgggaatggttcaaaatatagactattataccggaattattatacgtggatttacatatggcgtaggatttccaatttgcagcggaggaagatatgataatttgctggcgaaatttggaagagacattcctgctacgggtatagctataggcgtagagcgcgtcatggcttcaatatatgatgaaaataatgacagtgacaaggaaataagcagcagcgaatacgttaccgtggctcttgctaaaggcagattggcggaattatctgtagatatatttgaaaaaataggatttgatgtaaatcaaattaaagaaaaaacaagaaaattaatttttactgatgaagaaaataagttaaaatttatactggtaaaggcttccgacgtaccgacttatgttgaatacggtgccgcggatataggtattgtaggtaaggatacgcttttagaaaacaataaaaatctgtatgaagttttagacttaggttttggaaaatgcaaaatggcagtagccggtcctaaagaaatgaaagacaggattgataaacaaaacattatgcgtgttgcaagcaaatatcctagaattgccagagaatatttccataaagttaaagggcagaccgttgatattataaagttaaatggctcagttgagttaggtccgttagttggactttcagatgtcattgtagatatagtcgaaagcggtaaaactttaaaggaaaatgggcttgatgttttggaagaaatttgtgatttaagcgccagacttgtggtaaaccgagttagcatgaagttaaaacgcgataaaattgttgatattattcaaaagatgaagggagaaataaactgttgaagatttaccccgcaatagacataataggtggagaatgtgtcagactcgttaaaggcgattattctcaaaagacaacttattcacaaaatccggttgaggttgcaaaaaagtgggaagaagcaggcggtgaatttcttcatatcgttgatttggatggtgcaaaatcaggtgatatgccaaattttgaactcataagaactatagtatctgaacttaatataccggttgaagttggcggaggaatccgcagtatggaatgtgtggataagtatttaaacgctgggattgcgagagttatcttgggaacttcagctcttaaaaatcccgattttgtcaaattggctgttgaaaaatacgaggataaaattgctgtcggaatagatgctaaaaacggtatggtagcaatcagcggttgggaagatgtcagcaatacgcctgctgttgagtttgcaaagttaatggaaagtatcggagttagatatataatttatactgatatagcaactgatggtatgttaaatggtcctaatatagaggctatggcagaaatgcttgaaaatgttaatgtaaacataatagcttccggaggtgtaactactttaaatgatgtgaaaaaacttgctgctttaggcgtagaaggcgctataataggcaaagcgctatatgccggaaatattgatttaaaagaagctattttgaaaggaagatgttaataatggaatttataaaggatttgaagttcgatgaaaaaggtttgatacctgccgttgcacaagatgcggtaagcggtgagatattgatgcttgcatacatgaacgaagagagtattaaacagacaattgaaacaggacatgctgtgtattttagcagaagccgtcaagagctgtgggaaaaaggcgctactagcggcaatattcagaatgtggttgatatgtatgttgattgtgatcgagacgctatagtattaaaggttaatcaaaccggcaatgcttgtcatactaacaatcactcttgttttttccgtaaggttgcgaatggaaagcttatagaaattcctaccggactagcagcgagacctggaattttatatgatgtttataacgtaattgttgaccgtgtgaaaaatccaaaagaaggttcatatacaaattacctatttgaaaagggcatagacaaaatgctgaaaaaagtaggagaagaagctgcagaagttatcatagcttcaaaaaattatgtaaaatcagaggttcaatatgaaacagcagatttactttatcatctgtctgttgttttggttgagcagggtttaacttgggatgatatatttattgagctgcaaaaaagatataaataatattcaaaatttattcaggaggtaataaaaatggttggaattgagcacgtgggaatattttcaaatgacactgccgcacttaaggattggtatattgacatgttcggctggaaggttgtttatgacaatggcaaaggaacatttttcttaaaagcagatgacggtggcatgattgaattttgtaagactgacattgacggcggaaaacaggatatgaaagcaaccggtatcagacatattgcaatttctgtctccgattttgacggaatggtaaaaaaacttatggatgccggcgttaaggttctgacagaagctgctgttaatccgaaaggaattggaacaatgttttttgaggatcctgacggaaatgttcttcatttgattaacagaccttctccgctataaaccatacctaagttgtttggcacaaattaggtttacaagataaaagcttgtaaacctatttgtgttttgtttataatatgtaagattttacagccaaatgatataagttaatttcagataattttattaaattaatttatattatttggtttaaaatataagaagaggaagtaaccattttgtttagtgaaatttcaaataccggcgaattaaaaaaaatgaatattgaacagcttcaaaaattggcttcaagtataaggtcttttttgattgaaaaagtctcaaaaacaggaggacatttatcttcaaaccttggagttgtcgaacttactattgctcttcacaaagtgtttgaccttgaccaaaatgatgatattatatgggatgtaggtcatcaaagctatacccataagattttaacaggcagggcaaataagtttgatatgctaagaaaatatgacggtataagcggatttcctaaaacatctgaggataaaagggatacctttaatactggtcatagctctacttcaatatcagctgcaagcggaatagctaaagctaaagagttaaaagggatttcaggaaaaacaattgcagtaattggcgacggagccatgacaggcggaatggcatttgaagcattaaattattccggtcatacaaccaaaaacttaataattattttaaacgataatgatatgtctatatcaaaaaatgtaggtggaatttcaaaagcattaaagcgtttaagaaatgcaaatagataccttaaatttaagcaagatgttaaattagcactagataatatacctgttgtaggaacaccaactaaaaaggggttaacaaaatttaaaagcgacttaaaaaaaatagtaataaatggggacagcgtatttgaaagtatgggatttacatacatgggtcctgtagacggacataactttgaagagttatttactattctggaacattctaaaacagttgaagaaccagtgtttatacatgttcatacaaagaaaggaaagggatatttacctgctgaaaaccaaccagagctgttccatggcgttggttgttttgaaccatctaccggcagaattatatgcaacaatgacagaattacatggtcagaatgctttggaaataccatgtgtaaattagctgaaaaaaataaagatttggttgcaataacagccgcaatgccattcagcacaggattggttgaattttctcagaagtatcctcaaagattttttgatgttggaatagcagagcagcatgcggtcacattttccgccggttttacaagagcaggaatagttcctgtttttgctgtttattccacttttcttcaaagagcttatgaccaaattcttcatgatgtttcacttcagaatcttcatatgatttttgcaattgaccgttcaggtccggtaggcgctgacggtgaaacacaccaaggagtatatgatatatcatatctttcaccaatgccaaatatgactattttttctcctgctttagcagaagactttgaagctatactaaatatatctgtaaatgatttaaatggacctgttgctataagatatcccagaggttctatcttataccgttcagacttctctaatgtttcttttccaaaattggaatatagaaactgttttaaggctaaggtgttagagacctataatactgttgatgtattaatagtttctgttggtgtgatgttgaaaaacgctatagaaacaaaaaaactattaaatgatatgggattttcagtttctttggttgacgcattttgtatcaaaccgattgatatttcaactataagaagagaaagcaacaaagctaaaattgttgtaacaattgaaaataatgtaataatcggtgggtttggagaaattcttcagtctcagctcgaccgctcaattgttaaatttgcttacaaagacgagccaatccctcagggaagtgtaaaagaacttgaggaaaagtatggtttatcaccgcagtctatagcggataaaataaaaaaattactaaggtgatatattgttatgggaaaacagagacttgataattttttagtagaaaacggatacattgaaactcgcagcaaagcacagtctttaattatggccggaagtgtttatgtcaataaccaaaaagcatcaaaagccggtgaacaaataaaaggtgatgaaactatagaagttagagataatggtattaagtatgtaagccgcggaggtctcaaattagagaaagcattaaaggtttttccaattgatttatccggcaaaatatgtatggatattggcgcttctaccggtgggtttacagattgtatgctgaaaaatggagccgttcgcgtctattcgatagatgtcggatatggacaattggcgtggaaattgcgtactgacgacagagttattaacatggaaagaacaaactttagatatgtaactcatgatgaaattagtgacgatattgattttttttcagttgatgtttcttttatttcattgaagcttatatttcctccagcttttaaacttttaaaagaaagcggttatggcgtgtgtctgataaagccacagtttgaagcaggaagagacagagttgggaaaaaaggtgtcgttagagatatcaacgttcataaagaggtaatagaagaagtaattagtttcactaaagagattggatttaaagttttaggtttggattattcgcctataaaaggtcctgagggcaatattgaatacttaatgtttataggaaaaaccggtgataatgcggatataaatattaatgagatagttgaaaattcacacagcttaaataatctggaataaattttggtgatatatatgaaaaagatttctattgttccaaatacacttaaagatgagaattatttggaaacaaaaaacttaataaagtatctgtctttatatgaatgtaagattttttttgaagacattcataagtctgatctgtacgatttttgtaaaaatatcggtataaattattcttttgttccacgtaatattctgttttctgaggcaaattttttaattgcgcttggaggagatgggacaataatagaaattgctgttgacgctgcaaaatatgagattcctattgttgggataaatgtcggcactttgggttttttaacccaaacggataaaggtgattattctgccataaaagatgtaatagacaataattacgggttaactgagtgtatgatgctggatataagtatcatttctaaagataatcaggaaatctgtaattttctagcgcttaacgacttgatagttacaggagattcatataaaatgataaccacatctacttctgtagatggaaccaatatggggcgttactctgctgacggtcttatagtgtccaccgcaataggttcaaccgcatattctctctcagcaggaggtgctgttatgcatccggaagttgatgcaatgattattactcctatctgccctcatacattaaaggcaagaagcactgttatacctggaaacagcacagttgaaataacacagattccgccttttagaacagaagcagttgctcgcgctgacggaaaaataatatacaagtttaaagattcatccgaaaaaataagaattaaaaaatcaaagtatacgacattattggttaaacaagagcatacaaacttttttgatgtgcttagaaataaattatctgattaaaagatgattataaaaatatcgactgaggtgagtggatgttaaccgaacttcaaataaaaaacgttgcaattattgataatattacaattaatttcggagccggttttaatgttttaactggagaaaccggagcaggaaaatcaatattaattgattcaataaatatggccttaggcggaagaacagcaaaagatttggttagaaacggaacagaatacgcattttctcaagcagtttttgaagtaaatgaaacagttgaaaagaaacttacagaatatgatatagagcttgaagataatactttgattttatcaagaaaaattaccgcagacggcaaaagcagctgcaggattaatggcagaacagcgcctctttcaatagttcgtgagattggaaatatgcttttaaacatacacggccagctggataatcaggcgctgcttgtttcctcaaaacatcgtgagtttgtagataattttgccggaaataaagatatattggctgaatatttaaataaatatcttgaatattcaaaagttcttaaaaaatttgaagaactacagcagtccgaaactgataaagaacatagaatagaattgttaaaatttcaggttaacgaaataaaatctgcttctttaagaccaggagaagaagaggagctaataaaacggcgcgagtttttgatgaatgttgaaaatataatgtctaatgccattgaggcacataacgcattgtacggagatgaaatgacaaaatcagcatacgatatgctttatgatgcaaatcaaagtcttgaaaaagctgctgagtatgatgagaagttaagcagttattacgatacaatctcttcagttcttgctgatattgacgatgtaacaagagaattaaaatcttatatcgacggaatagattatgaacctgaagaaattgatattgttcagaatagacttgcattaatatcagacttaaaacgtaaatataactgcttggatattgactctgttttagagtactgcaataaatgtgaagaggaaatagccgaaattgaaaatttagaaaatacaattgaagcaataaaagatgacgtaaaaaaatctaaagacgctttaaccgcagcagcaaaaaaattaactgaaacaagaataaaagccggggaatttttagctgaatccataatgagagaacttgctgaacttgacatgaataaagtagtctttaaagtaaagataactgaatctgattttacaataagcggatgtgatgacatagagtttttgatttccacaaatcccggtgaaaatctcaaaccgcttagcaaaatagcttccggcggtgaaatgtcaagaataatgctggcaataaaatcaattttatctaaaggcgatattgtggacactctaatttttgatgagatagataccggcgtaagcggacgggccgcacagaaaatctcggaaaaaatatgtaaaatttcaagaacaaagcaggtgctttgtataactcatttggctcaaattgcttctatgggtgatttccactatctaattcataaagacagtgatgaaacaaaaacgagaacattcgttaatttattattaactgaagaaagaaaagatgaattatcgagaattattggaggggtatctgtaacggatactactttaaaagctgccgaagaaatgcttcagcaggcagaaaatcttaaagattcttttatataaaatatatttacaactgagtaattattatctatttgacaatatgattgaaatttattataatgatacaataaaattaaatatataatcattgggtaatgacaatattattataaacgaatttaaaccgaggatattatttatatggaacaaacaggatatgtagttgaaataaaaaatggcgttgcaaaaattagaattgaccgtgaatctgcctgcggaggaaaatgtgtcagctgtaaaggatgcccttcaaatgctattattgtagaagctaaaaatgaactcaatctcaataaaggcgacatagtaacgctatatgaagatacaagaaaagttatgaaatatgcttttattggctatggtcttttagcgattttgttagttgttggagccattgtcgggtatgttttaactaagcgtgacattatggcactagtgtctgctgcattatttgttgcagtcggttttttgattattaaattttcgtttaggaatatagacagtgaatttaccataaagtcagttgaaagacaaaatattgatgaataactgggagacagaatgaaaaatgatgctgtgttttataatttaaataaagatgatgtaaaacgcataaccgtgattaccgggcattttggaagcggtaaaacggaatttgcactcaattatgctttggcgcttaaagaattaggacttgatgttataattattgattttgacattgtaaacccatattttagaacaaaagatgcagaacaatttttattaaatcaaaaaatagatgtaatttctcctgaatttgcaaatttgaatatagaaaacccatatttacctcctgaaattttgcgcgcttttgatgataaatcaaagtatattgtttttgacgttggcggcgatgaagatggagccacccctttaggagtttataacgaacattttctaaaagaagaatatgatatgttttttgttttaaacgaaagacgtcttcttacgcagagtgtagatgatgctttacaaatatataatgaaattaaatatgtttctagactggattttaccggtatagtaaataatacccatttaatgcagtacactaataaagagattcttttagagggtcagaagttagcggagaaattttctgttaaaacaaatattccgattaagtttataaccgcaactcctaaaatacttgcagaaatatccgagtattctgatataaatacttataattgttttccgctaagactttttgttggtcctggattttaatataaactataaaattatggggtcattcccttaatatattgtatgataatctgtatagaaagaaggaagaaatatgccaaaagttagttttagacaagacaggtgcaaaggctgcggactttgtgtgtctgtctgtcctaaaaaaattattgctattgattctgctgttttgaatgataaaggatatcatccggcaggagttattgatatggataaatgtattggttgtgcgttttgtgcaacaatgtgtcctgattgcgtaatatcaattgaaaaataaggagatagataaaatggctaacaaggttttaatgaaaggtaacgaggcattggcggaagctgcaatgcgctgtggctgtagatttttctttggctacccaataactccccaaaccgaacttgccgcttatatggcaaaaaaaatggagaaaaacggcggaacatttttacaggcggagagtgaagttgcggctataaatatggtttatggtgcagcaggcgcaggcgcaagggttatgacgtcatcatcaagcccgggtatcagcttgaagcaggaaggaatttcatacatagccggagctgatctgccatgcttaatagtaaatatagttcgcggcggtcccggtctcggcggaatacagcctgctcaatctgattattttcaggcaaccaaaggcggaggtcatggagactatcatctattagtatacgcaccgtcttcagtccaagagcttgctgatttaacatcaaccgcttttgataaagctgataaatatagaatgccggcaatgataatgggagacggaatgctcggtcagatgatggaacctgtagagtttaaggagtatattgaccctgaaagtcttcctgaaaaaacgtgggcaactaccggaacaggtatgaaacgtaaaaagaatatagttaattctttatatcttacgccggaagagcttgaaaatctttgtatcgaaagagaaaaaagatataatacaataagagaaacagaatctttatatgaagagataaatacagaagatgcagatttaattattgttgcatatggaacgattgctagaattgcaatgtctgctgtcgaagaagctagaaacaatggtttaaaagttggtttaatccgacctattacattatggccgtttccggcaaaagtttttgaaaaacgtgcggaaacagctaaatcattcctttgcgttgaaatgagcatgggtcagatgatagaagatgttaagctttctgttaatggaaagaaacctgtttatttctatggaagaaccggcggaatggttcctcagcaggacgctattcttgaagaaataaaaaaatgtcttgatgcaaatgcataacataggagatgaaaataaaatggaaaaaatatttgatagaccacactcactcagtgatgtagtgctctcatattgccctggctgcacgcatggagttattaacaggctaattgcagaagtggttgatgaaatgggacttgaaggtaagaccattggcgtatgtccggttggctgcagcgtaacggcttataacttttttgaattcgatatgcaggaagcatcgcatggcagagcgcctgctgtagcaaccggtattaaaagagtacatcctgaaaatcttgtatttacatatcaaggggatggcgatttggcggctataggtactgccgaaactatacattctgctgccagagccgaaaatatcacaattatttttgtaaataatacaatttatgggatgacgggcggtcagatggcgccaacctctttagtgaatcaggttacgcaaactacgccgttcggcagaaaagtagaaaatcagggatatccgatacaagtcagtgaaatggtgtcaacattaagaggcgcctgttacgttgaaagagtatctgtagataatgttcccaatataaagaaaacaaagtccgctatcagaaaagcatttgaatgtcagatggcgggattaggattttcactggtagaagttctttcaacttgtcctacaaactggggtatgtcaccggttgaagcgcttgaaagaatacgcactgaaatgatgcctgaatttcctttgggtgtttataaagactgcactaagaccgggggtgttagataatgtatgaacaaattgttatagccggatttggtggtcagggtgttttgtttgttgggaaaactttggcttacttaggaatggatacaggaaagaatatctcttggctgccatcttatggacctgaaatgcgcggcggaacatgcaattgcagcgttataatttcagataatcaaattggctcgccaattatccagtcaccggatacacttattgctatgaataagccgtcacttgagaaatttgttgatactgtaaaacctggtggtataatagtattagacagctctttgatagacttaaaagttgagcgctctgatgttaaagttgtatacataccggctatggaaattgctgaaagtttcggaaatagccagcttggaaatatggttatgaccggagcttatataaaagctagagaaacaatgttttcagcagatgacttatatgacagcgtaaaaactcatattccccctcaaaagatgaatttggctgaaaaaaatattgaaatgataaaggcaggatacgaatacgataaatgttaatttcaatttcaaatcttagtaaaagttttggagaaaatcaaatattaaaagatattaatttgaccatagaggataattgccgctatggtcttattggcgtaaacggagccggaaaatcaactttgctcagtataattatgggagagctagattacgatgacggtgatatatataaatctccaaatttgacaatcggatatttgaagcagaatagcggtcttgacagaaactccacaataatatcggaaatgcgcaatgctttttctgacattattaaaatcgaggatgaactaaggcttatcgaggaaaaaatgctttcatattcagaacataattcatcggaatataaaagtttaatgtctgaatattcaaaaaaacagtcttattttgagagtatggacggttataatattgacgtcaagataaaaacggttttaaatggactgggattctcagatagaagcctagagacagaaataaatgttttatccggaggggaaaagacccgacttgcattagcggctctcttattggaagaacccaatttgttaatattggatgagcctacaaatcatttggattttaaaacccttgactggctggaaaattatttgattaactcctacaaaggttcgcttttgattgtgagccatgacagatattttcttgataacacagtagagaatatgttggagatagagcgtggtaagatgtattcttataacggaaactattcaaaatatttggttcttaaagaagaaagaaatgaggttttgagaaaagagtatgaggcgcagcagcttcaaatttctcaaatgcagacatatatagataagaatataaccagagcttctacgtcaggaagcgccaaatcaagagtaaaagcacttgagagaatggaattaattgaaaagccggatgatgatattaagcctattaaattaaagtttgaaactatcaaagaaccctataaagatgttttaacagttgaaaatctagacattgctgttggagatagagagtccgccggcggtattaaaaatatttgttcaggtttaaacctcagtattaaacgcggagataaggttgctctgattggagataacggaattggcaagtcatcgtttctaaaagtaattcaggatataattccccaccaaaacggttctgtcgtttggggaaaaaacacaagcgtaagttactatgagcaggaaaatttaaatttaaatcccgataatctagctattaatgaattgtgggacagatttccacgcattccggaggctcaaatccgaagagttttaggaaatgttcgacttacaaaagaagacgtttataaacctgtaaaagtaatcagcggcggagaacgagcaaagctagcgttctgtataattatgctggaaaaatcaaacgtcatattatttgatgagcctacaaatcatctggatttaccctcaaaagagatattagaacaggctatgaacgagtatgacggcactttattgtttgtatcgcacgacagatatttactcaataaagtgccaaacaaaataattgaaatgaccaaagacggttttacaatttatgacggaaattttgggtattataagcaaagaaaagaatggattaaacagaaacaatctatagaaacaaataataaagttgaaacaaataattcatcacaaaaaagcagcggaggatataggtctaaggaacagagaaaagcggaaactaaacgaaaacttcaaatcgctgagcttgaaaagatgatttctaagactgaggaagaaatttcagcgcttgaaaatgaaatgacaaaggaagaagtattttcaaattatattttgatgaatgaaaaaaacagcgagcttgagaaattaaattcaaatttagaagagtattatgacaattggaccaaactgtccgaagaacaagaataaaattatttgttcttcggaccttgactttcaatttctgataaaggattttgggcaacagcctctctaatttgattattgtttacatgagtatatatctcggttgtgctcaattgtttatgacctaatatttcctgtaatattctaatatcaacacctgattgatgcattaatgtagcagcagtatgccgcaatttgtgcgtagtatatttatgagaatccattccaagctttttaacatatttttcaactatatgctgaacggttctccggctgattcttttgtttctttcagataaaaataatgcgtttttatcttttgattcaggtgacattttttggcgtatttttaaatatgacttgattgctgatatacatgaattattaagatatacagtgcgctctttatttcctttacctgtaacaactaattcgtccccacgtatatctgtaatattaattccaaccaattctgcaagccgcataccgcagtttaagaacaatgtcaaaatacaatagtctcgttcataatttcgttcatcaacagcatttaataaattaatactatcctgaagcgaaaaatattttggaagcgagttttcaaatttaacagaatccaaatcagctgtcggattatcatgaagcaacttaactttgctgcacaaatatttataatacgatctcaatgacgaaatttttctggcacgtgttctagcttgatttcctaagtctcgatttaaaaaatcagcatattcatacagcagatttaaatcgactttttttaaataatcaatattgattttatcaatgtcaatttgattaaagtcattatttgaatttacaagattaaagtgtaaacataaaaatctataaaatgttctaatatcataaaaatactcattaactgtttttcttgatttgccctgaatactttcaagataaatcaagaaagaatgcaatggttcaggcgcatatttaatattgtccataataatcacacatttccttttattattttcatcttccatcttttgtcacaaaatttttattttgtgaaatgttctatttttattatatacctctactgattttatttccagtatttttagattaaaattatattacaatttatcttttaattttataacttgttgctattcaatatctgttaggatataattataaaatatacaattataataattttaaagcaggtacacatatatgataaaaattgaaggaattattgatacagtgattttttataactctgataatggttatgcagtctgtgatgtatcatgtattggcgagcttgtcacaatgactggaactatgccaaatataactgagggtgaaaaaataattgcttcaggtgaatggacaactcacgttgactatggtgatcagttcaaagttgagtatattgaacgcgtaatgccatcttctgaaagtgaaattgaaaaatatttagcttccggaatcttaccatatgtaggaaaaatgactgccaaaaaaattgtcgaaaaatttggcacagacgcacttgacgttatagaaaatgaccacgaaaaactgcttgaaataaaagggctgacaaaaagcaaaatcgaggatatttataaagcatttgttgagcaaataggtatcagacaaattgttatgttttttcaaaaatataatgtttccccctcttctgctgttaaagtttttaaaattttcggcactggaactatacctttggttcaaaataatccgtatattttagcagaccaaattgatggaattacatttgataaagctgatgaaattgctatgtctttaggatttgaaacgaaatcgtatgttagaatagcttccgggattaagtcaattattaaacgtatttcttttttgaacggtcatacatatcttccacggcctacaatcattgcccaagctgtttctatgcttgaagttgaacagggacctgtagaagacgcaatttctcaattattacttagcggcgaattaatatctgaaaaccagggtgattatgacgcaatatatttaaaacttttttatgacgctgaacgtgaggttgccgaaaaactaataagaatgtccggcgtaacatttgatatagatataagtcaaattgatggtttaatagacaaagtagaaagcgaagatagaattgaacttagtgaaaatcaaagagaagctgtaagacgtgcctttcagactgcagctttggttatcacaggaggccctggaacaggtaaaaccacaataataaatacaattatcaacgcaatgaaaattgaacataacaaggttatgttagctgcaccgacaggaagagccgcaaaaagaatgagcgaagtctgtggatttgaagccaaaaccattcaccgccttttagagattacaccgggagttgacgaggttggcagctgttttgcaagaaactcagaaaatccgctggattgcgatgttttaataatagatgaaatgtcaatggtagatattatattaatgaaacatttgactgacgctttatcctccagaacaagattgattatggttggagacagtgaccagctgccttctgttggagctggaaatgtcttgaaagatataattgacagcgacagcattgagtgtataaaattaacagagatattcagacaagcaaaagaaagtatgatagttgttaatgctcaccgtgttaataatggtgaagaacctcttttgaatgataatgacaacgattttttctttgttcacagagatgacccaatgcagcttccgaatactatagctgatttatgcgtcaggcggttaccacgatattatggattagatggtataacgcagatacaagttttaacgccgaccagaaaatctttgataggagtacaaaatttaaatacaattctgcaaagctgtttaaacccaccatctcctgacaaaaaagaatatataacaagacgttgtattttcagagttggcgataaagttatgcaaataaaaaataattatcagcttgaatggaaaagagatgccgagaaaggtttaggagtttttaacggtgatgtaggatttataatagatattgacagcagagcacaaaaaatgactattcagtttgatgataaaatagtcgtttatgattttttattactagatgaaattgagcttgcctacgccataaccgttcacaaaagtcaaggaagtgaatttgatgcggtagtaatgccaatgtttgaaacacacagacttttgatgacaagaaatctattttatacggctataacaagagctaaatcacttgttgtattggtcggtcaagaaggcgttatggctcagtatgtgaataatgataatgttcaaagaagattttcaggtttaaaagataaactaaaaatattttaattttcaaaaaaataggagatatatagatggaacaatacgcagcgccactaagagaattaatagaagaatttaataaactcccggggattggaaataaaacagctcagcgtctagctttctatgttatgaacctccctgaagaaaaatcagctaaactagctaacgcaattattaatgccaaaaagaacattagatactgttcagtttgtcaaaatctatctgaatctgaggtatgcaatatatgttcaaatactgcaagggaccacagtataatttgtgtaatggaaagcccacgagacattatgcaaatggaaagaacaaatgaatataaaggcgtttatcatgttctgcatggcgctatttcacccatggataatataacgcctgacgatattaaaataaaggaacttgttgcaagggttgcagagggcggtattaaagaagtaataatggcaaccaatccaaatttggagggtgaagctacttctatgtatatatctaaactattaaaaccttttggggttaaggtgacaaaaattgctcatggagttcccgtaggcggagaattagaatttgcggatgaagtaacgcttggaaaagcattaaactggcgtgttgaaatatagttgaggtgaaaagttttggagaataaatataatataaagctagctcaaacagataaagagattgaacaaattgcaaagtgcgctgaaattacttggcattacgcttatgataatttgctgcctgacggtcaagtagattatatgatagagaagttccaaagttttgatgtattaaaaaaggatatcaaaaataatgattatgtatattatattattcaagaagatgatgcagtaattgctttttgcggaataagaccggaaaatgataagttgtttataagcaaaatttatgttgatcccaaatatcagcgtaagggtcttgcgacgaaactgtttaacaaagttttaatagaatatagagataaatataaactattttatttaacagtaaataaaaacaatactaaagcgatatctgcatataaaaattttggttttattataactgacagtactaaaactgatattggaaataattatgtaatggacgattatattatgacttataataattaaattacttatattattttaaaatttatattaaaaaagcgaagataaatctctttaaaacagagaatcttcgcttttttatttattaacatccagcaattgatttatacttttttatccaacactgtttaaattaaaagataactttttttaaaatgccaaatgtagggttcttttttctaacacattaatatattattttattggcacagttggtgcatttgtgtttactgtctgtatttcttgagttagtgcagcttggttgccgtttggcagaagctgactttcatttcccattggttgagtaagcataaagcaaaataccagcgatttagctgctttagctcgggttacctctatctttggttcaataattttaccatttgaaacagagcctctagcaattccgctctcagttctgataagacctagattatacgcctttttgagtttttgataaaggtcagtattaatcgctgccttatcatctagtacgccccaaccggtaagcggtatatacggagtaccttcatacttgatatttggatcataattggggtcatcaggtgatggaacactgccattttgcgctatatacatatcaataattgatttgtccgctttttgatatgcatcatagagaattgctcccatcacttcacgggtaagagctgcgtcactagcaactatagtgtcttccaccagaggtggttccgctgtgaattcagctgttacatttgaatctttggttgcagtaaaggtggcctcttttgaaattccaataacctctccatctactaagattgatttattaatataatactcgtttggcaacgcaacaactttgattttgtcattagcctttgcaactagtgaagttgtgctatgcggatagtcatttgactcatattgaataccaaacaatcttcctgtgccgccatttgtataaacttgatatgtctttccagctttgacatcaaaagtcacagcgttatatttattatcttttgttgtgccggcaatagtagtattatttatatactttgtagatgttgtaccgtctgttttattttcacatgtaattattttatggtcaacaaacataagataaagtgtgagtacaccgtcttcctttgccacatactcaggctgttttgttccgttattacgaatttcaatagccgatgttgtaatatttttgtttaatgcaaacacaccaccattatctaccttcttaactatctccgacggagccttaaatgtatagtattcattatctcccagtacagagtttgctgttaccttacttgtaatatcagtagttgctgtgtgaaattcactctcattatagaccgttacagtaccgcccgccgccggttgtgttacattgattgtaacctcaccttcagcaagttctgtactattatctgatgaaaccgaaactgccgttgttgacacttctgcgttctttgtttgcagttcagcatatgttttattgtaattagtaagtgaattttcttctagaccaaatgctttttcggctccccttgcaaattcgccaaccgtaatcgtttgagttggtttaaaattgttattgctgtccttatggagcaaaccaacttcaagagctttttcaatatttggcctataataataattgtttttgctctgtttaaccgcaccgggaattatgccaactgtactcacatctgacgccatttcgggaaatacagcagaccaattgcctgattttgctgcttcctggacattttcaggcatgtaacttaccaatttttgcattatctctttgtctttataaatgtcatcagcggaattagcctggtcatatatgctttggagcataattctgcaccactgctttgctatagcttcacgataatgtgtaccgtctcctcttgttccattagctgcattgattgcaggagtttcgcctgcctcatatgtgttatagatatagaatatctcatttgcatctaaactatcaatatacgcttttgcaccactgtaaagctcaaccaaaccgatttctgaatccgaagcggccttttcacgcatattacctggagaatcaggatcaaatccattaggttttttagagctttccgaatatcttccgctgccggttctcggcattgctgtaacaagtacaggcgtcataccgcgttcttttatagctgtcatatacatatccagccacttattatagtttgcattattggctgcaagatcgccttcttttacagaagaaccacgttcgtatctatctgtgcttacagtctcgtcattgtgtgctgaatgtataaatacaaaatcgccgactttacctctgataagaatttcgtcaaatctgccttcatcatagttactcttcatagcacggccgcccattgagtaattaacaacattaaccttgtttaaatcaaaataatttttaagtgtttgtccccacgaacttatagtttcgttgaaactgtaagccttttgagtagagtcacctaagatatgaattgtcggcttatcacctgtcgcattattttcaagcggcgtcactttaatttttttaataccaacagtcttcggagatgattctgatggcagtttggaaggttctacatcgatttcaataaaattttcccctgtaccaaaatcataagaccatgtgtttccattccattgagcacttactgttctcggaacctgaccgcagttatcccaattacttgtacttgtcagacgtgaggcctgcatacctgtaggagcaacccaagtatccgctgatgtgcctgttacctcaacttctatatgatatgcacccggcttcccggtgtcaattctgtaaataagaccgccgtaattataatctttatcaccaccataatgcaaatatgagcctgttgtttctgtaactgtagctccattatctgatgaaatcttaatattatctgtcgctcccacctgtctcatataagattccggcattatggtatgtgatttatcaacaaacccctgaccattatctttattatacaccgggacttcacttaattttgtgaaatctattgttacttcactaacaggttcagaactatccactgtttttatattgctgagtggtataatattgttagttccatcccaaataaataatttagttttcccgctttcaggtttatagtaatccaatacttcttctcctacggttcctatatcaaattttgcacaatcagttataattttttcactgctatcctcataagttacaacgaacaatactgcattgcttaattcaccatttgaagtataactaatatatagtttaccggcatcattgaaataagcctcactaataacaaaaacatttgagttttcagtttgttctgctaatactgttacgcctgcaaaaactgtaaaaacaaaagtaatcattatgacaaaactcagccatctcttttttaacattttgcttcctccttttcccgtaagggttatatatttgttcaaattatagcacattcacatataaaatcaatagccaaacgtcttatagtttttaataccagtttacaattattccgtagaaagtacagtttatttgtacaaaagagatgtataaaaaatatttttttaaatagtttttaacaaaaaacagctttttactataaatgcaaaaagctgttctaaaatatattatttaatatgtgaagaaattattttataccaaatcttaattttacaaaatcacaaattatctttgcagtgtcatcaataccaagagcggaactgtcaaccgatatgtggtaatttgtaacatttccccactcttgatttgtataaaagttataataattactcctctttttatcggtctttttcattgtttcaagagcttctttttctttttgtttatagatgcgcataacgcgttctaatttaaactcttcattagcatgaataaaaatgtttacaacattatcttgatttctcaaaacatagtctgaacatcttcctactataacgcaggaattatccttaaccaaatcctgaataacctgagactgaattctaaaaatagcgtcagaattcaaaacatcgccatatctataaaatgaatttctatcggattgaagacccataactaaagaatataataaactattagttggcttttcatctataccttcaaaaagattttctgaaagcccgctttcttttgctgcaatagcaataagacccttatcataaaattctattccaagcatatctgctacttttttagcaacttttctgccgcctgaaccaaattgccggcctactgtaataacataatttttacctgcttctactttattcatatcatttcccatattatttcctcctaatacagatgattttaacatatttttttatttaatgcaaattataattgaaaatttattgtataaaataaaactaaaacttttgtacatatttaccaaataaagttttagaattcccaaattattatatctttaattcttcagatgttttcttgacattattcttaaagtatattataataacttagttgtataaatttataaatatacaattccttactcctatatttataggggtcaaagtccagaaggaggtgacaaatatggcagaacatatcaacaagtatgagactattatggttttagactcttctaaaacagaagaagaaatctctgcattgcttgaaaagttcaagtcattgattgaaaaacacggcgaaatcgaaagtgtcgatgagtggggaaagcgtaagcttgcttatccaatcaatttcatgaatgaaggttattatgtattggttaactttaaatcaaaccctgatttcccgaaagaacttgaacgtgtttatggtatcacagacggcgttttaagaaacatcgttgttagacgtgaggaggactaattatgattaataaagtaatcttaatgggaagactcactcgtgatcccgaagttagacacaccagtacgggaaaagctgtttgtagtttttctatagctattgataatggatatggtgaaaacagacagacagatttcatcaactgcgttgcgtggcaaaatcaagctgagtttctcggcagatatttcacaaaaggtatgatggtgattgttgcgggccgaatttcgactcgtacttgggaaggtcaagacggaaaaaagaattatgttactgaagttatagcaaatgaagtgaactttggtgaatctaaaaagtccagagaagaaaacagcggttattcaggaggatataataatgctccgcagcagcaagcatattcttcttatggtgcagagcagcagtcaaataattatactgctccagctcaacaaatgcccggcggacttgaagaagatgaatttactccgttatctgaaattgatgacgaccttccgttctaaaatttaaagttaaggagagtttaagatggctgaagaaagaagaaacgacagaccccgcggcagacgtcctaagagaaaagtttgctcattctgcgttgataaagttgattacatcgactataaagatgttgcaaagctcagaagatatgtaacagaacgtgccaagatacttccaagaagaatcagcggctgctgtgcaaaacatcaaagacagctgacagttgctattaaaagagcaagacagattgccttgatgccttatacatctgactaataaaatatttcggctcaggttctgcctgagccattttttataaaattatttaaaactattgtgtttttaataaaaataatgtaaaatattatttatataaataatattaatttttactaaggagaactgattatgaaagtacttgtaattggcggcggaggcagagaacatgcaattatttggaaacttgcccaaagcaaaaatgtatcaaaaatatactgcgctcccggaaatggcggaattgcggatttagcagagtgcgttcctatagatgtcatggattttgagaaattaactaaatttgctagagaaaataatattgatttaactgtcgtggctcctgacgatcctcttgcagcaggcgcagtcgatgcttttgaagcaaatggtttaagagcttttgggcctaataaagctgctgcactcattgagggaagcaaatcattttctaaagatttaatgaaaaaatataatattcccactgcagattatgaagtgtttgaaaacagtacagacgcaataaattatattaaagcaaataacaaattcccagtcgtagtaaaagctgacggtcttgctttgggaaaaggagttataatagctaaaacatttgaggaagccgaaaatgcagttcatgacatattagatgataaaatttttggtactgctggtgctaaagtggtaatagaagagtttttaaccggacctgaaatttctgttttagcatttaccgatggtaaaactatgaagccaatggtttctgctcaagatcataaacgtgcttatgacaatgatgagggacctaataccggcggtatgggtacgttttctccaagccgagtttataccgatgaagttgcagaagaatgtatggaaaaaatattcattccaaccatgaatgcaatgaatgcagaaaatagaacttttaaaggagttttatattttgggctcatgaaaactgcagatggcgttaaagtaatagaatataactgtcgtttcggtgaccctgaaacacaggtagttcttccacggttaaaatcagacttatgcgaaatatttaatgctgtaatagaccagaggcttgatgaaatagatattgaatggaacgatgatgcctgtgtatgtgttgttatggcttcaggcggctatcctaaaaactatgaaaaaggatataaaatcgatggtataaaacaagcggagagtttgggagcacttgtattccatgccggaacaaaacgctccgataatgatattttaacaaatggaggccgagttttaggagttacagctctaggagataatcttgaagacgcaattcaaaaagcatacaaatatgttgatttagtaaactttaagaatgcccactttagaaaagatattggaataaaaaaagaaatctagttaaaaaacttactatcatatttttctgcagtcagtttccataaacaggagactgacttttttatatttaataactaaatctgatatgtatcaacttacagcaaaatataatttgatttttttatacatcttcttctattactatttattctttctatgtttatatatttacataaaatttatgtcttgtgaaataataacaatagattataagaaagctaggtggtattatggatcaagaaaaacttcctgttaaaaatgaccgaggttactatgaaatacgactagagagcattggcggactgggagctaatctttgcggaaaaatgttgggagagctgggcgttacatgccttaagctgaacgctgccagtttttcaagttatggttcagaaaaaagaggttcaccggttaaagcccatattcgatggagcgagccggatgttgagattcagcttaacagcccgatagagtcaccgcatatattggggctttttcacgaggcgatgacaggtaaagttcccgtaacagccggattaactgaaaaatcaaaggtcgttataaatacttcacgctctccagaagatatacaaaaagctttaaatctttgcggcggagagatattttgtatagacgcacaaaagatagcaatggaaagtaaaactagaataaatatggttatgcttggggcaatatgtaaagcgtcaaactttgttcctttagacgctgctataaaaataactgaagaaactatcggtaaaaaatatccggatttaatcgaaaaaaatattgatggtgtacgacgcggatataatgagacgatttctaagttttttgagcgtaataataaaatagaaccactaaaatataaagaagcagaaaatcgctggggatatgaaaatgcaccaatcggaggtatcaataccaggataggcagcaccgtatcaaatgatctgtcagcctccagagaaggttatattcctttatttgttcaagaaaaatgtataaactgcggcttatgtgacactacatgcccggatatggtgtttcagtttatgcctggcacctacaaagaaaaaccggctatggttaatatgggcttagattatcaccattgcaaaggatgtctaagatgcgttgatgtttgtcctacaaacgctttagttgccggacttgaacgtgaacatccgaataaaaaatggtttgtcagaaataaagatttgattgtagataaattggaatatgaagatgcaggcgcaaacagctggattaccagcgaagcttatttgaatgaaaaaagagtggatggaggtattgtatgagtaaacaaaaacttttatttgaaagcggtaatgaattagccgcatatgcagcaaaacagattaattaccatgtaatgggatattatccgatcacaccatccacacaaatagcggaatatttggatttaatgaaagctaatggtgaacatgatatatctcttattcctgccgagggagagcacagtgctgcaggaatatgctacggagcgtcaaccggcggcggaagagtttttaacgcaaccagcgcaaatggacttttatatgccttagaacaattacctgtgcaatccggaacacgtttcccgatggttatgaatgtcgcttgcagaactgtatccggtcctctttcaattaaaggagaccacagtgatattatgtacactcttaacaccggatggataatactttttgcaagcactcctcaagccgtttatgattttaatatttgtgctttaaaaattgctgaaacggtaaaattgccggtcatagtagcttttgacggattttttacaagccaccaaaaacgacgttgttatgtatttgaagaagataagaccgttcaagattttataggtaaatataatgcagaatattcggcacttgatttagaacaacctgtttctatcggctcctatatgaatgaacctgacattttaaataataaatatcagcttcatatggctatggaagatgctagaaaagtaatacctgaagttttttcagaattttcaaaattatctgaaagagaatatcaattcactgaaagttataaaaccgatgacgcggaagttattttattcttattgggttcaagctatcatacagcaaaaatggctgtggatatattacgtgaacaaggaaaatcagtaggagtatttacatcaaatgttctaagaccatttccagcaaaacagcttgctcagaaatgcaagaatgcaaaaacaattattgttggagacagacaagacagttatggagctaacggcggaaatatgacgctggaaataaaagcaatgcttcaagacgcaaagttagatacacgtgttatatcaagaatatatggtcttggaggacgagacttttatgttgaagacgctatagaatttttagaagccggattagattcacattctaaatcatttgactataagggaatatatccgggcgatatgagtacgcctaatactcaatactttaatcctataaccgacgaagaatccagccccggtctaacaacatgcaaatggaacgatgataagcagaatatggaggtatcaggcggcagaataaatgaaactacaaaaatgccaaaaagacttgctcccggtcatggagcgtgtccaggctgcggaataccggtgaatgtcaatttacttctgagaggtatcgaaggaaacgttgtactgctgttccatacgggctgcggcatggttgttacaaccgcatatccaaagacttcttttaagattccatatgttcataatcttttccaaaacggagctgcaactttatcgggtcttgttgaaatgtttcatcagagacaaaagcgcggcgagtatccgaaaggagaaattacgttcataatggtaagcggtgacggcggcatggatattggaatgggaagtgcaatcgggactgcgttaagaaataatcatattattctatttgaatatgataacggcggatatatgaataccggttatcaattgtcatattcaactccaaaaggcgcaaaaagttcaacttctcatgtaggtgaatatcagtacggcaagtcattttttaataaagatatgcctcagataatgtctgctacaggtattccatatatagctactgtggcagaatcaaatccagcggatttcataaaaaaagctagtaaggcaaaagcgtattcacaggaaagcggaatgtcttatttacgtgctctttctgcctgtcctttgaattggtctgataagccaaacctagaaagaaaggtaattggagctggcgtggactgctgctattttcctctatatgaaatagaaaatggaataactaatataaattataatccagaagataaaaacaagaaaataaatgtacttgaatggctgagtatgatgggcagaacaaaacatcttaaagataaaaaatataaatatatagtagatgaaattcagggggaaattgaccgaagatgggaaagattaaaagctcaggattcaaatccgcttttgtaagaataaaaataaaatcatgtatattttaacagcaattacaaataatagatatataaaataactggaggtgagaagatgagtccaaaagaattactttatattgaagacgctcttggccatgaacaatttttgaaaacgcaatgccaggatactgccaacaatcttcaagacggcgaattaaagaactatgtttcacagcttgtaatgaagcatgatgaactgttcaaacaattctataatttagtgtaacatagcgctattattgatgaactcgttaacagagaaaggatgaaaataatatggatgataagaaccttatggaaagtttgctgatgtcaacaaaaggagtatgcgacctttatatgcatggttcaattgaatcgggaacaactaatgtaaataactcatttaataaagcattaaatgacacattatgtatgcaggatgaaatatataagaaaatgacagcaaaaggttggtacccaaccgaacaggctgaccaacagaagataagccaggttaagcaaaaatttgctgcacaagcgtaaaaatatataaataatataaaatgcactttcattgatacgatagtttaaatacatcgacaataaaggtgcattttattattcaaaacaaaaacgccgtataaatacggcgtttggcaccctctacgtgagtcgaacacgtgactagcccttaggaggggcttgttatatccacttaactaagagggcagattaaataatcaactgtttaattatatacaaagtgacctttattgtcaagtgaaaaatataaaaatttcatgctttactgtaggattacaatagatgtgttacaaatagaaaaaaagaatacggaaaactcataaattgtgttatagttatatcaccataatatcacatactctcagatggttgaaaaacaaatagtgaaaaagtcttttgaaattgagtttcctcaatcatcgaccttaggatttcttggctaacttccgttacttccttccgcttccttcttccataattttcaggctcaatgccttactctcttacttccgctctccgcttccgttactcttctcagaaccaaggggtctccttagaaaggaggtgatccagccgcaccttccgatacggctaccttgttacgacttcaccctaattatcaatcccaccttcgactgcgctctccctaaggttaagctacaggcttcgggtgttatcgactctcatggtgtgacgggcggtgtgtacaaggcccgggaacgtattcaccgcagcatgctgatctgcgattactagcaattccgacttcatataggcgagtttcagcctacaatctgaactgagactgctttttgtgttttgctccacatcactgctttgcttcactctgttaacagccattgtagtacgtgtgtagcccaggacataaggggcatgatgatttgacgtcgtccccaccttcctccgatttgtcaccggcagtcctgccagagtccccaacttaatgatggtaactgacagtaagggttgcgctcgttgcgggacttaacccaacatctcacgacacgagctgacgacaaccatgcaccacctgtctccacgtcccgtaggacttcacctatctctaggctatgcgtgggatgtcaagtcctggtaaggttcttcgcgttgcttcgaattaaaccacatactccactgcttgtgcgggcccccgtcaattcctttgagtttcaatcttgcgaccgtactccccaggtgggatacttattgtgttaactgcggcacagaaggggtcgatacctcctacacctagtatccatcgtttacggcgtggactaccagggtatctaatcctgtttgctccccacgctttcgcgcctcagcgtcagttatcgtccagaaagccgccttcgccactggtgttcctcctaatatctacgcatttcaccgctacactaggaattccgctttcctctccgacactcaagatatacagtttcaaatgcagccccggagttgagccccggtatttcacatctgacttgtctacccgcctacacgccctttacacccagtaaatccggacaacgcttgccacctacgtattaccgcggctgctggcacgtagttagccgtggcttattctgtgtgtaccgtcattatcttccacacttaaagaagtttacaacccgaaggccttcttccttcacgcggcgttgctgcgtcagggtttcccccattgcgcaatatcccccactgctgcctcccgtaggagtctgggccgtgtctcagtcccaatgtggccgatcaacctctcagttcggctaccgatcgtcgccttggtaggcttttaccccaccaactagctaatcggacgcgagtccatctttaggcgataaatctttgattatcataccatgcgatacaataattttatgcggtattagcatccctttcggaatgttgtccccctcctaaaggcaggttactcacgcgttactcacccgtccgccgctttccatccttatcttctccccgaaggctgccgttcgtataaatcgggttgcagcgttgttccaaaggagaattcttatgggaaaagaagcatttgatttctttcctttagacgtgcatcttagtgataagatggagcttatagaagcagaattcgggttaatagggtttgcggtaatcgttaagctgtggatgagaatatacggcagcagaggttattactgtgaatttgatgaagaggttgcattgatgttttcccacaaaacaggggttggtgtcaatgccgtttctgaaatattgaacgcagcatttaaaagaggtatttttgacaatgttctgctgtctcctactaatcttgcaggtacatccaattttatttcttctccatttttttgcatcctattactgtcaattgtcactgatacttttattccatcctttgttgctgttgccgtttgggtttcattttcccattctacttctgctcccaatgcttcgaatattgctctcattggtactaatgttctatcaagcaattgacgcaccaaattggttggcagtaacattagcaaaatcatgttttcctgctctgaagtcgctattatatatattaccgttcgaaaaaacggacgtttcattctccgaaagactcataacctgcgatatgttattaaaggctccgtacagctctgatacatttagtctcagattcagctctgtttcacagtttattatttcttccctgcttccttcataaataaaaacgccgcagaccacgcacctctcgtaatccacagcgtttccttatggtcggggtgacaggattcgaacctggaacaaacaacgctatatacgtatatttaagaatatcgactgataattgactttaaaaactgaatgtatttaacttttccgctgtttcggatttacgttcctgtctaatgtgcgtgtagatatcttgagttaattttatgtctttgtgtcccattaattcttgagcgtcttttgcttctattccggcctcaaaaagtttattatatacctcaacttttctatgcactttattgtttcattttcaattatttccgtatatacagtgtttatagtgaacatcggtagggcagaagtcgtctgcctcgttaggtgaactaccatctcacgcaaagcgtgaatatatttagaatagtttgttataaacctttctaattacaagttttccgcgactgcgcgccttacgcggcgtacttcgcacaccatcatcccaatcagcataccgctgatgagttgaaattgattactgatatgcgccgccgtaatcccaatgctggacttgttgtgttttgggttaagcttcgtcaaagaggctatactcgttctattacaggtctttaccgcatatcatatactacgtcaaagtatctttcataattatttctaatcattactccttactcttctctttattcaattttcaaacatcttctcaacctatcttctcagatggttgaaaaacaaatagtgaaaaagtcttttgaaattgagtttcctcaatcatcgaccttaggatttcttggctaacttccgttactataaaaataaatataaaaattttataaaaatgtggtatagcaagcatcggtagggcgtgcgaagtacgccgcgtaaggcgcgcagtcgcggaaaatttgtatttagaaaagattatggacaactgttctaaatatgttcacgctacgcgtgagatgatagttcacctaacgaggcagacgtcgtctgccctaccgatgttcactataaacactgtatatacggaaataattgaaaatgaaacaataaagtgcatagaaaagttgaggtatataataaactgataattaatcttatagaaagttataaagataataataaaagatattaacaaatccgcgactgcgcacctaacgaggcgcataaatgcgccctgccgatgtttgccaaaacaacagttttattagagaaaataaataatatatcggaatatctttattcacggcagttcacaaagtcaacgggaaagttacagggcttttttcatcatgaagccatgcttcatggtgaaatgagcggggtgcgagcgccccttggagccgttaggcgacctaagcgagcaagcactttttctttggtgaagcgtttctttttcttgccagaaaaagaaatggttcaaacaccattataatgtaataataaaatttttatatggggtcatatacaaaaaaacacttatgttagattttaaacaaaatatataaataaaaataatgatttaagacaagttgatgttgcagaagttcttggaacaagtcaaactgtatattcaagttatgagcttggcaaaaaggatattcctgtaagacatttggtgaaattagccgacctttataacgtacctactgactatatattaggccgtactaatgtattgattccatatcctaaaatataaattgtatattgaacactgcgtgttcagatgtttgctcacctaacgcgcttgctaccgcaagcctaccgatgttcactgaaaaccctgctttttttgtattaatttggactaaaaacacaataaaaatctgattatccactaaaacacagtatctatcagcattttcaaggaaacaaatacatcaatttactacttatttactaccattgaatgagccttgatacgcaagttttcctagatatgcaaagatatagtacagcacatcagtattgaaacaagaaaaaattgaatatttcatagactatggaacgcataacatgacgttccttttctatttctagccgttcttattggacggctattttattactcaaaatgaaaggagcattagatttatgaaaaagatgttaaaacgattgtgtacgggcttcttagctcttgcaactgtcgttactgctttaccaactacaaccgttcatgctgaaagcaagcaatactggacggaaagtgcagagcgtgtcggtatcattgaaaaagtgatgaatgacggttctatcggttctacattcaatgagggcatgatgaaagtcgagggcgaaactgcctattgtattgacatcaatacagattttaagaacggctacaagaccagagctgacgcaagctcacgcatgagtgccgaccagatttcagatgtggcgttatccttagagtatgtcaaacagtatggcgaagctcacaaggaactgaactacaaacaagtttatctgttggaacaatgcgttgtctggcagagattaagcgtacatcttggctggcaatgtgataacgtgcgagcttcttatgatgaaattccaaaatctacgcaggacgaagttttcgctggtgcaaaagcctttgttaaagagaataaaggacgctatgaatgtggcggttatatctactctggcgaggggcaggaattgggacaattctgggcgaaactgaatgtcggaaatacgaaactgcaaaaggtttccagtaataccagcattacagacggtaacgggaattactctattgcaggtgcgacctatggtgtcttttctgataaggactgcacgaaacagcttgccacccttacgactgatgaaaacggaaatacagatattgtagaggtaaaagcaggcacagtctatatcaaggaattatccgcaccagcaggatataaagtggataaaactgtatattccttaaaggttgaagctggaaagacagcaaccttgaaagtatcagatacaccgaaagtaacggacactttgattgagcttttcaagattgatatggaaacacagaaagacaatccgcaggggaacgcttctttagcaggtgcggaatttacatggaagtattatgctggcttctacaataaaggaaatctccctgccgaagctactcgtacatgggttacaaagacaatcgctgaaacagacagcgacgggacaacccactacatcacaaaattaacggacgcatacaaggtgtctggcgacagcttctatatgcaggacggcaaagcggttcttcctttaggaacactaaccgtagaagaaacaaaagctccaaacggctacttgttagagggtgcatatatgcaggctggcgataagtccgaacagattaagggcttatatgtaacacagattaccgaggacggagaccttgccgtactatctggaagtaaccagttttccgtatcagacaaggttatccgtggcggtgtcaaaattcagaaacgagatttagaaacgggcgatacaaagccacaaggaagtgccactttaaaagatactgcctttgacatcatttccttaaatgataattctgttttggttgagggaaagctatacaagaaaaatgaagtagtaaaaacaattcatacagatattgagggtgtcgcttctacttcttttgaccttttaccttatggaaaattccgcatcgttgaaagtgaagcccccaacggttacttaactgacggtgcaaaaccgattgattttacaatcacagaaaatggaaaaatcgtggacttatctgacgaagctcattctatctacaatcagattaagcgtggagatattgaaggcgtaaaaatcggagcaggtacacacaagcgtcttgctgatgttccttttaggatcacaagcaagacgacgggcgaaaatcatgttgtggtaactgatgataacgggcagttctccacttctgctgactgggcttcacataagcacaataccaacgcaggaaagaccagtgaggacggtgtgtggtttggaacttctgaaccagacgacagcaagggtgcgttaccttatgatacctacatcattgaagaattaaaatgtgatagcaacaaaggctttgagcttatcccaccgtttgaaatcgtggtatcaagaaataaccttgtgattgatttagggactttgactgatgaatacgaaaaagaaatctctatccataccacagcgaccagcaaggacggagaaaagacaatccttgcaggaaaagagattacgattgttgatactgtcaaattggacggacttacaaaaggcacaaagtatcagctcaaaggctggcagatgttaaaggaagaaaacgcagaacttcttattgacgggaaacgtgtagaaaacgattatacctttgtcgctgatgatgaagaaatgaaagtggaaatttcctatacattcaatgcgtctgctttaggtggcaagaaccttgttacctttgaagaattgtatgatttcagcaatccagacgaacccgtgaaagttgcggaacataaagacattgaggacgacgggcagaccgtacttatcacagagcgtatcatcaaaattcatacgactgctaccgataaagacggcaataaagaacttgaagcaggaaaagacgttacaatcattgataccgtaaccttagagggcttagaagtcggcacaaaatatcagttaaagggctggcagatgttgaaagaagaaaatgcagagcttcttatcaatggaaagcgtgtggaaagtgattatacctttactgctgacagtgaaactatgaaagtggaagttgcttttacgtttgacgctacttctcttgacggcaaacagcttgtaacatttgaggaattatacgatttaagcaatccagacgagccgaagaaagttgccgagcataaggacattgaggacgagggacagacgattacctttaaggaaaagccagaagtcccagaaaaaccagagaaccccgaaacaccacagacaccagaaaagcctagcagaccgagcgacagtcccaaaacgggcgataacaccaacctttacggactgcttgcacttcttatgacttctggtgctgggctggcaggtattttcttctacaaacgccgtaaaatgaagaaattataaggcggtaacggtatgatgaaagaaaaatcacgctctccgccgaagctgtcaaacggcagacttccgcttattctggcttgtctgcctacaacctgcaagaacacggatagtcaagggtgcgaagcatacattttaccctttactatctgtgggattgctggtatttcccgaaccgccagaataagaaatcacaatcaattaacttatcaaaaatagaaagaaacgaggtaaaacactatggaaatgaaatatgtcgtgccagatatggcacagtcttttggaactcttgaatttgcaggcgaaagcgagccagtctttgaaaaagataaaaataaccgcagggtcttaaccagacgaagctataacctttattccgacgtacagaaaggcgaaaatgttgtggtggaaattcccgtgcaggctggcgaaaagcatttcaagtatgaacagaaagtaaaacttgtcaatccgaagttatacggaagaggttacgcaatcggggatatgggacataccgattatgtgttgcttgctgatgatattgtagcagttgaagaaaagtaaaggagtgaagaatttatgagattatcaaacgggtttgtcattgacaaagagaaaacatttggagaattaaaatttacagcggtgcgtgatgtgttcttgcagaatgaggacgggacaccaagtacccagcttaaaaagcgtatctatgatttgaagtgcagtctgcatggtggaattatccccgtgtccgtaccgccagaagtaccgttaagagaatttccgtacaatgcagttgtggagcttgtcaatcccgtagcagatacggtatcaagaaagacgtttggtggtgcagatgtggactggtatgtaaaggcagaggatattgtgttgaagaataaaggcaaccagaacgcaggcaatccacagaataataacacgcagggacagccgaaaaaacaaaattagagattagatttttattgtgaggtaattcgttgaatgatataattaggataaattgtgaggtgcttatctatgaaagtattagttagttcatgtatcatgggaaaaaactgcaaatataacggtgggaataatctcaatccgaaagttgtagagtttctaaaagacaaagaggttatcgaaatttgtccagaattattagcgaatatgcctacaccacgtcctagtgcggaaatagtaaatggtattgtcatggatataaatggaaatattgttgatgaggaatatcgtcatgcggtacagttggctctaaatgaaataagaagtatggaaatagatttagttattctgcaatcaagaagcccaacttgtgcagtcaagaatatttatgatggtagttttacgggaaaattgataaaaggtcaaggtctgtttgcacaagcgttaattgaggctggatataaagtgttggactcagaagatttttaatgaatggtaatgaaaaagcagttagtcttaggattgactgcttttttcgtacccagaaaggagtgattgatttatgcgtaagatttggaataaaggacaccgtatcagagccagcgacaagcaccttgtttatcatttttccatagggacgcttctgttggtattcgtggcggttctcctgctactgaatacaaaacagttcatgcgtaccgattgggaacatttcagcttgttagaaaatggcttgacgctttccccttacaacttcataaccatagggatagcgactggtgtttgtgcattggtcgcttttctgtattaccgcttctgttacgacagtttcaagaagctcctgcaccgtcaaaagctggcaagaatggtactggaaaataagtggtatgaagctgataccgtacaagacagcggtttttttactgacctgcaaagcagatcaagggaaaaaatcgtctggtttccaaagatttattatcaaatggaaaaaggcttgcttcatatccgctgtgaaatcacattaggaaaatatcaagaccagcttttgcggttagaggataagttagaaagtggattgtattgtgagctgaccgacaagaccctgcatgacggttatatcgaatataccctgctttatgatatgatagcaaaccgcattaccattgatgaagtaagggcagaaaacggctgtcttaggctgatgaaaaatcttgtctgggaatatgacgcactccctcacgctctgattgcaggtgggactggtggtggtaaaacctattttctgctgacgctcattgaagccttactgcataccaacgctatcctttatatcttagacccaaagaacgctgaccttgcggacttagggacagttatgggaaatgtgtatcacaccaaagaagaaatgattgattgcgtcaatgccttttatgagggcatggtacagcgaagcgaggaaatgaagcgacacccgaactataagacgggcgaaaactacgcctatctgggactgccaccctgctttcttatctttgatgaatatgtggcgttttttgaaatgctgggggcaaaggaaagtgtgagcctgcttagccagttaaagaaaatcgttatgttagggcgacaagcaggatatttccttatcgttgcctgccagcgtccagacgcaaagtatttttcagacggtatcagagataacttcaatttccgtgtgggattggggcgtatcagcgaattaggttacggtatgctgtttggttcagatgtgaaaaagcagttttttcagaagcgtatcaaggggcgtggttattgtgatgtgggaacaagcgttatcagcgaattttacacgccgttagtcccaaaaggacatgactttctacaagaaatcggcagactggaagaaaaaaggactgcaagcaacgaaagctgacagtcctacttcaatttcaatatgtcgtttggggaacattccagaaaatcacagagctttgcaaggattgtgaggtcaattctggaaaccttgttcttgcaatagttattaagctgtgtccgctgtaatttacacgcttcacagactttgtttttgctgatattcttctctttcaaaagattttctaaatcaatatatacctgcatacgctgtacctcgtcttttctttgaattataagatacaactgtattgataaataagatgtattaccgtagactgtattataatacaccctacaagaaaggacagtaacagtatgtgcaaaaagagaaaaataataacaatcacggtactttttgtactgggagtggcggtttcctatctgcaatggggacgtgagattgatgtagcaggaagtataggcacttcatcagaaaacttccatgaagaacacgttacctttacgctcaaccgtcttatcataacagacaaagaaaagtgtgcagaggaaatcatcaaaaaatgcagggagaatgattttgcttctactctgttcagctatgatgtggcaaagccaaacgctttatatggtacggtgtaccgttcccgtttttccatgaaaggacaaaagcctttgtttcacttccgatatacgcagacagcggacacgctcggttcatacaacattgttgatgatccagaagcgttcacgctggtaatcgaataatgcaaggcaggacgggacggcgacgtgcgaagcgaaaggcgacggcacggactagccgttgctggtgtggcgtaagccacgccagcaggtaaaacccctcggcatctaacagaggggtacgtttgcaaatagacaatagacaaaaaacataggaaacataaggcttctggcatggtttcctaacaaaaatcgactgtgaagtcgccttaaaaaacttcacacttgacagattgggggtatggttctgaatgaagaacaatggataaaagaattacgggagaaacggattgcttacggtatctcacaaggcaggctggcggtggcttctggtatcacaagagaatatctcaacaagatagaaagcggaaaaatgaagccgtcaaaggaacttctggaaactttgcataaggaattggcaaggttcaatccagaagcaccgcttaccatgctgtttgattatgtaaaaattcgttttcccacgctggatatacagcacataatcaaagatatattaaaactgaatgtcaattatatgctccatgaagattacggacattacagttatacggagcattattctttaggggacatctttatctatacgtcggctgacgaagaaaaaggtgtccttttagaattaaaggggcgtggttgcaggcagtttgaaagttacctgctggcacagcaaagaagctggtatgactttctcatggacgcattagtagacggtggcgtgatgaagcgtatcgaccttgctatcaacgaccatacgggcattttggatattccagagcttgcggagaaatgcaggaaacgggaatatatcggaaagtccagaagctataagttttaccagtcgggcgagcttatcaagcacagagaggacgacagagaatatatgggacgtactctttatcttggttcgctgaaatcagatgtgtatttctgtatctatgaaaaggactatgagcagtacgtcaagctggggacaccgctggaagaagccgacattatcaatcgttttgagatacggcttagaaatgaacgtgcctattatgcagtacgagatttgctgacctattatgacgcagagcagaccgccttttcgattatcaaccagtatgtgcggtttgttgatgaagaaccagacaagcggaaaaatgactggaaacttaatgaccgctgggcttggtttatcggcgataacagacagagcttaaagctaacgacaaagccagagccttacaccttagaccgcacattgcggtgggtacaaaggcaggtagcaccgaccttgaaaatgctgaaaaagattgataaaggaaatggtacagactacatggaaacaatcgaacagcaggcaaagctcacagaaaagcatgaaatgataatcaaacagcagacgacccctacaaaagatttggtggaaagttaggagtgatgaaaaatgtgggtattattaaaagacttcctgctggtatctatgggaatgggtatcggcgtagtcttgatgtgtattttgaatgtcggcaaagaagctgactatgaaatgaaacaattagaagaaagcgaggacaattaaatgaatttcggacagaatttatatcaatggtttttatcaaacgcacagagcttagtgcttatggcgattgtggttattggtatctacttagggttcaagcgtgagttttcaaaacttatcggcttcttggtagttgccttgattgctgtcggcttggtgttcaacgctggcggtgtgaaagatgtattgttagaactattcaataagattatcggtgcataaaattttattgtggtgctgatatgagaatggtataatttagaatatgaaataaagtgaatactatttgaggttgaaaatatgattatttatagcaaattggaaatcaatagaataaaagatttttgggagttattaaatcgtttagatactgaaacagattacatgatgtacgaaccaaatgaaagaaaagcgaaaactactattcaagaattaaaattagatattcaagacaatgtaattcaaggttttgattttttgcaagtggcaacagaaaatgacaaaatagttggttatattagagcagaaagaggaaaatttgaaagaaattttcatacggcatatattgttataggtatcttaaaaaaatatagaggaaaaggtattggaactactttttttaataatttagatttatgggctaaaacaaataatattgtccgtttggaactgacagttgaatgttgtaataatactgcaaaaaatttgtatgaaaaaaatggttttaaaattgaaggaataagaaaaaaatcaatgtttgttgctggttcctttgttgatgagttttatatggcaaaaattctataaaataaattttcaacttcattatttacaaagtaattggtcttaggattgaggtgttttattatgaatgagagagaaaaaatcattcgcttatggttcgatatgtggcttaaacagcaagatttaggaatggataaaatttttacagaagatgttgtttatacggaaagctggtgtcctaaatatgaaaatcttaaaacagtaaaacattggtttaatgaatggaatactcgtggtaaagtcattatttgggatattaaacagttctttcataaagaaaatcaaactgtcgtagaatggtattttaaaaatgaaatgaatacgggaagtgttgaagaatttgacggtatttccttaattgaatggacagaagataacaaaatcaaatcattaaaagaatatggttgcaatttgaataactacaatccatatcagcacagcgataaccctcaatttagagatgaaaaaataagctggttttaaaacttaatcaaattatatctatacacacaaagcagttagtcttaggattgactgcttttttcttacctaaatttcagattggagtgatgaaatgaacgatatttttaaggatatgcaggtaaaagtcggctgtgaatacatttccgacctgccctcttacaagcgtaaggtgtggcatgaaatgaaacgactgaaccctgccgactatgaagaaagacagttagaagatttttcaaagtatgtgtttggtatgtcgtaccagaccataaaagatgtgataaaacaacagaaaggacgtgaggaacaatgcaggaaacaagggtgctggtggaaacgagaggaacaactggcgaagaaacaatatcatactggttcgacctgccgatagatgttgccgagtttgaagaaaagctgggtgtcggtgcagaaagtggggattaccgcattatcgaaaaggtgttgccttatgctgatgaagtccacgaacataccagcgtgtaccagctcaacgaattagattttatgtaccgccagctttcgagcgatatgcaggaagaatatacagcacttcttacggtgtatgaaaatttagaagcactttatatttgcagaaatgtgattacggtttatcacgactgcaaaatcatgatagatgttgcaaggcaaaagctgatgaacgacccgacgttcaaacatctgtccgaggactgtcaagaatattattttgactttgaagcctatgcttctcacttgcaggaacacgggaaatttttagtaacggaacacgctatctttgaactgccagagtaggaaatgaggtggtgcttatgattgatgatatggcggtttacattgctaatcttggcaaatacaatgagggctatttagtcggtgcttggttcacgtttcctattgacgaggaagatgtgaaagaaaaaatcggcttaaatgaacaatatgaggaatatgctatccatgataccgacaacttccctattgcgattggagagtatgtttccattgaagaactcaatgaaatgtatgaaatgatagaggaacttcccgactatatcgtagagtgtctggacgaatttatcagccactacgggacgctggaagaagtcgtggaacacaaggacgatatttattattatcccgactgtgaaaccatgacagacgttgcctattactacatagacgaattgcaggcactaggggatattccacccagcttacagaactacattgactatgaagcctatgggcgagatttggatatgggtggttgctttattgaaacaagccgaggtatgtgcgagataccatactaacgctggaagatcagcgacaagcattgttgctactgacagcgtatttctcttttaagggacagtctgaaacatggctgtccttttctattttgaaaggagctgaaagaatttgaaaaagattaaatcttatacgggtatctggaacgtggaaaaagtcttgtatgcaatcaatgactttaacttgccctttcccgttacctttacacagattacatggtttgtgattacagaatttatcatcattctgtttggggatattcccccactttccatgattgagggagcatttctcaaatactttggtattcctgttgctctcacttggtttatgtcgcagaaaacctttgacggaaagaaaccgtacagctttttgaaatcacagataacttatgcgttgcgacctaaaatcacttatgcaggaaaagccgtaaaactgcataagcagatattgaatgaaacaatcacggcagtaaggagtgtgaactatgttcccgataaaatatattgacaataaccttgtctggaacaaggacaatgaggtgttcgcctattatgagctgataccgtacaactattctttcttatccgcagagcagaaatttatcgtgcatgacagtttccgacagctaatcgcacagtcccgtgagggaaaaattcatgccttgcagattgccacggaaagctccatacgaagtatgcaggagcagtcaaagaagctggtaacgggaaaattaaaggaagttgcctatcagaaaatagacgaacagaccgaagcgttggtatctatgattggggacaatcaagtggactaccgcttttttcttggttttaagctcatggttacggaagaacagctcaatctgaagaacatcaaaaaatcggcgtggctgacgttcacggaatttctccatgaagtgaaccatacgctgatgaatgattttgtttccatgccgaatgatgaaatcaaccgttacatgaaaatggaaaagttactggaaaataaaatctcccgtcgctttaaggtgcgtcgcttggaaatcaacgattttgggtatctcatggaacatctttacggcagggacggtatcgcttatgaagattatgagtaccagctaccaaagaaaaaattgaacaaagaaacgctgataaaatactacgaccttatccgtccgacaaggtgtgtgattgaggaaagccagaggtatttaagattggaacatgaggacaaggaaagctatgtatcctattttaccgtcaatgcgattgtcggggagcttgattttccgtcgtctgaaatcttctatttccagcaacagcagtttacattccccgttgatacaagcatgaatgtagaaattgtggagaacagaaaggctcttaccacagtaagaaataagaaaaaggaattgaaagaccttgacaatcacgcttatcaagcaggaagtgaaaccagctcaaatgtggtggacgcattagacagcgtggacgagctggaaacagacttagaccagagcaaagaaagtatgtataagttaagctacgtgatacgggtgtctgcacccgatcttgacgagctgaaacgccgttgtgatgaagtcaaagacttttacgacgacctcaatgtaaagctggtgcgtcctgctggggatatgctggggcttcattctgaatttcttcctgccagcaagcgatatatcaacgattatgtgcagtatgtaaaatcagacttcttggctgggcttggctttggtgcgacacagcagttaggggaaactacgggtatctatatgggctattccgttgatacgggaagaaatgtgtacctgcaaccgtcccttgccagtcaaggtataaaaggtacagttaccaacgctttagcttctgcttttgtcggttcgcttggcggtggaaagtcattctgtaacaatcttctggtgtattattcggttctctttgggggacaagcagttatcttagaccctaaatcagagcgtggcaactggaaagaaacgctcccagaaatcgcccatgaaatcaatatcgtaaaccttaccagcgacaaggacaatgcagggcttcttgacccgtttgtgattatgaagaatgtaaaagacgctgaaagtctggcaatcgacatcttgacattccttactggtatttcctctagggacggcgaaaaattccccgtgttgcgaaaagcggttcgttccgttacccagagcgacagtcggggcttgctccatgtaatagacgagctacgccgtgaagatacgccagtatcaaggaatatcgcagaccatatcgacagcttcacggactatgattttgcacacctgctgttttcagacggtacggtagaaaatgctatcagtctggataaccagctcaatatcattcaagtagctgaccttgtactgccagataaggacacaacctttgaggaatacacgaccattgaattattgtcggtatctatgctgattgtgattagtacctttgcccttgattttatccattcggacagaagtatttttaagattgtagaccttgacgaagcgtgggcgttcttaaatgtggcacaaggcgaaaccctatcaaataagctggttcgtgctggacgagctatgcaggcaggcgtttatttcgttacacaatcttctggggacgtggcaaaggaaagtctgaaaaacaatatcggcttgaaatttgcatttcgtagtaccgacttgggcgagataaagcagaccctagaatttttcggcattgacaaggacgacgaaaacaaccagaaacgcttgcgtgatttggataacggacaatgcttgttgcaggacttatacgggcgtgttggtgtagtacagatacaccccgtctttgaagaactgctacacgcctttgataccagaccgcccgtacagagaaatgaggtggagtgatgaaagaaaggataaaaggtgcgttcacaaaaaggaagatacttcactttctcaaaatggctctgttcgtggtggcactctcccttatcctgctttcacttttggggacggtggctcatgcgacgggacttgtagacgataccataaacgaagaaaatctttactcaaaatatccgctgtcgaattatcagcttgatttttatgtagataatagctggtcgtggcttccgtggaactggctggacggtatcggaaaatcggtgcagtacgggctttactgtatcactaattttgtctggacgataagcctttatttaagcaatgccacgggctatgtagtgcaggaagcctataagctggacttcatcaacgatatggcagacagtatcggaaaaagcatacagacccttgcaggcgtaacacagaacggtttttccagctctggcttttatgttggtttcctgcttctcattatcttagtggtgggactttatgttgcctatacgggacttatcaaacgggaaaccagcaaggcacttcacgccgttatcaactttgtagtggtgttcgtactgtccgcttcgtttatcgcctatgctcccgattacatcaagaagataaatgaattttcatcagacatcagtaccgcttcacttgatttgggaacaaaaatcatgctccccaactctgacagcgagggcaaggacagcgtagacttgatacgggacagcttattttctattcaagtggaacagccgtggctactcttacaattcgggaacagcaacgcagaagaaatcggggcagaccgtgtggtcgctcttgtatcggcaagtccagaggacgaggacgggaaaaccagagaggaagtcgtgaaaacagaaatcgaggacaacgacaacaacaatctgacgataccgcaggtggtaaaccgtttaggtatggtgtttttcctcttgttctttaacttaggtatcacgatatttgtattcttgcttacgggcatgatgttgtttagccagatactttttattatctttgcaatgtttttacctatcagctttttactttccatgataccgagctatgaaagcatggcaaagcaggcaatcgtaagggtgtttaataccataatgacacgggcaggcataacgctcattgtaacggtggcgttcagcatttccagtatgttttataacatctccaaagattacccgttctttatggtagcgttcttgcagatagtatgtttcgctggtatctacatgaagctgggcgatttaatgagtatgttctctttgaacgctaatgacagtcaaagcatgggacgaagaattttccgcagaccgtatctgtttatgcgacatagggctaggcgtatggaacaccgtattgcaagggcggtaagtgctggcggtatttcgggcggtgtggctggtgcggtggctggaagtgccgttgctaataaacgagctgaaagaaaaaatacagcttctaaagaaaatcggggcaataccacttccagcatgggacagcgtgcaggctcaaaggtgggtgctgtcttagatacgaaaaataaagtgaaagacaaagcaaacgctgtcaaagaaaacatcaaggatatgccgacacagaccgcttatgcggtgtattccgcaaaggaaaaggcaaagtccagcgtgtccgacttcaagcgtggcatggtgcaggaacagcagtccagacagacgggacgattggaaaagcaggaacagcacaagaaaaatatcgctgacaagcgtatggagcttcaaaaggcacaagaagcaaggcaggcacagcgaaaggctgacggatcagcgacaacaggagctacccgtccccatgagcgaccagccacagcttcaaagccgagtgcggaaaaaatgcaggaagtcaaacgtcctgccacagcgaccacttcaaaagcaagtgagccagtcaagacaaatgttatcaaagagcgtccgttatcttctggtgcttctgataggaaagcgacccagtctgcacagccagtacataggcagaatgtagaaaaagtggtatcgcaggaaacacgccagaattaccccaaagaccgcaggacaaaggttcagcagacgcagagcgtccagaagaaccagcagacaacagagaaaacccgtaaccttgtaacgaagaaaggacagaagaaaaaatgaaactgaaacatatcgctatcattggcagtctgtttcctatcctcttttctctggtgcttttctttggagtgttgattagtgcggacagcgacgacgagaacagcaatttttcttctggcattacgggtatgaacctatccgcagaagtcttgaaacatcagcctatggtagaaaaatacgccagagaatacggcatttccgagtatgtcaatgtgctattggctatcattcaagtagaaagtggcggtacggcagaagatgttatgcagagttcggaaagtcttggtttaccgcctaattccttagatacggaaagttcaatcaagcaggggtgtaagtattttgcgtccctgctttcttcctgcaaaaatcaaggtatcgacgatttgaatgtagcgatacagtcctataactatggcggtggctatgtgggttatgtggcaggaaaaggaaagaaacacacttttaatcttgcagagagcttcgctcgtgagaagtcgggtggaaagaaagtaacctacaccaacccgatagctgttgcgaagaatgggggctggcggtatggctatggaaatatgttctatgtggaattagtcaatcaatatctgactgtggcacattttgataatgcgacggcacaagcgattatgaatgaagcgttgaaatatcaaggctggaagtatgtgtatggtggcagtaacccgaacacttcctttgattgtagcggacttgtgcaatggtgctatggaaaagctggtatctccttaccgagaacagcacaagcacagtatgacgctaccctacatcttccactctcgcaggcaaaggctggggacttggtgtttttccattctacctataacgctggttcgtatgtaacgcacgtcggcatttatgtaggaaataatcagatgtaccatgcaggcgacccgataggatatgcagacctaagcagtagttactggcaacagcacctaatcggtgcaggacgagtaaaacaatagaaaggacttgaaaaatatgtttaagaagaataagaaacagacagaaactctcaaagaaccaaaagaaaaaaaggtgcgtactgtcaaggtaggcacacataagaaaaccgtgattgcgttgtgggtggtgcttatcgcaagcgtgagttttggggtgtataagaattttaccgctatcgaccagcacaccacccatgaaaaagaaatcattgagcttcgcttgcaggataccaacgggatagaaaatttcgtaaagaattttgcgaagtcctactacacatggaataacagtaaagaagcgattgaagcaaggacacaggcaatcaacggttatctgacaaaggaattgcaggacttgaatgtggataccattagaaccgatataccaaccagcttcacggttacagatgtgattgtatggagtatcgaacagtcgggaacggacactttttctgctacctacgaagtagatcagcagataaaagagggagaacagacaagcaatgtgaaagcaacctataccgtaaaagtccatgtggacgctgacggggatatggtaatcgttcagaaccctacccttgcaccagcaatcgaaaaatcggactatgagcctaagacaccagaagcagatgcaagcgtagacgctgatactgtcaatgacgctacctcttttctggaaacattctttaagctgtacccaacagccacagaaaaagaacttgcctattatgtaacgggaaatgtgcttgaacctatcggcagggactatctttattctgaactggtaaaccctatctttacaaaggacggggacaatgtgaaagttaaggttgctgtaaaattccttgataatcagacaaaggcaacacaagtatcgcagtatgaacttgtactacataaggatagcaactggaagattataggataaatcaagaggcttgtagttagcatttttgcatgattacaagcctaaacttattgacaatcgtatcatataatactatactgtacttgtaaaggtaatacagtataagacaaggcggtggtatagtggatatttttatcaataatcatgccagcataccgatttatgagcaaatttcttcacaaataaaggcaatgattatcaacggagatttgaaagctggagaagcacttccctctataagaggactggcaaagtcgttgcatattagtgttttaacggtgcaaaaatcttatgatgtacttcaaaaggacggttttattgaaacaactgctggaaaaggttgctttgtatccgttcaaaatcaagatttctacttagaagaacaacaaaagaaaatagaaaattattttatagaagcgattgaaattgcaaaggtaagcggaataaagctggataaattacaatctttacttgcactattatatgaggaggaatgagattatggaaaaatatgctttggaacttaatggagtaactaaacaatatagtgacttcaaacttgacaatatttcctttactgttccgcaaggtagtatcgttggattgattggagaaaacggagcagggaaaagcacaacaattaaagctattttaggtttgattgttactgagcaagggaaaatttctgtatttaatgggaaagatgtcaacgctgaaacgaaagaacatatcggtgttgtatttgatggaagtaattatcccgataatttaacacccaaaaagttaggaaaagtttttcaaaatatttatgctgaatggaataatgaaaaatattttgagctattaaataagtttgaacttcctatcaataaaaaattaaaagaattttcaaaaggaatgaacatgaagtattccttagtggttgctctatctcataattcaaaattgcttattcttgatgaagcaacaagtgggcttgaccctgttatacgagatgatattttagaaatgtttttagattttattcaagatgaagaacattccattttggtttcatcacacatcacaagtgatttagaaaaaatcgctgattatatcgtatttatacatgaggggaaagtattattttcaagacctaaagatgaattgactgagcaatacggtatcatcaaatgcaatgctaaacaatttgatgaattgaataaaaatgatattatccgttataagaaacaagattatgaatggcaagtgcttgttgcaaatagacaaaaagcaaaaaaggaatatccacatactttagttgtacctgcttcaatagacgatatcatgttactttatgtgaaaggggaatgttgattatgaaaggcttattattaaaagattattttgctattaaatcttcgatgataatattactcattggctttgttgtctttgggttcggagtttctttttatgctccaccctatgttttaatgctgatagcttctattatactagggcaatttgtaacaactacaatttattcagacagaaaatgtggttggttgaaatcatcaataacatttccaacatcaaaaaaatcacatgttagcagtaaatatattatgtatgctctattatgtttgttaggggttgttgttggtctagttttaagtattattattacttcaatccgtaatgaactagatacacatttgcttttattatttacttgtatgacaactactatgatatttatgtcaggggctgttcttattccttgttactattttatcaaagaagaattaagcggagctattggaattttagcatacggaatatcgggtgtatttttctttggcatgattaagttaattgaaaatcatgttttggcacttactattagcatttttacagcgataatactttttgttatttcttggtgctttctttgccaacagataataaacagagatatttaggagtgatttaatgctaagaataaaaaaacgagatattaaaaaagcgttaaaagcaggtgcaaaggctggcgctatgtcattagctgatgttcgggaaaatattgaagcaacgattgatgaagctatgaatagcaccgacccagaggtgcaggcaaatttcaaaaagtattttgggaataaacgccctacaccagaagaatatatttatatcattacgaaaaagacaaaagtaaaagtgtaaataaaaacgccgtgggaaacaactcacagcgtgagatctgattatcacggcgttaaattatttttggagcaaatagttttctccccagttgcatagttcatcaagaataggggttaaggtttttccaaattcagttaaagaatattctgtttttggcggtacaactgggtaaactttgcggttaatcaatccgtctttttctagctcacggagttgttgtgctaacattttatctgttgctttgggaatgagcttatgaatttcgttataccgtaatgttttattcattaaatgccacaaaatgacagccttatattttccaccgattagttgaatggttgcttcaactggacaactaaaaccacagcaattattttccataatgttctctcgcttttcttttgggtagtatattacaaaatagtgcgttcttgtctaatagactattacgaatataattatagtataggttgacctaattcacaagaacaaaggagattgaaacatgaatgtattagatattgcaaaaaagaggtattccgttagaacatacgaagataaaccagtagaaaaggaaaagttggagaaaatacttgcttctgctcatgttgcaccaacagcggcgaacttacagccagttaaattattggtggtgcaggacaaagaacgattgaaaagtattgcaaaagctggaaacatatataatgccccattggcaattattgtttgtgcagaccattcaaaagcatggacacgaccttttgataacaaacagacaacagatattgacgctactattttgacagaccacatgatgttgcaggcaacagagttgggattaggtacagtttgggtatgcttttttaaaccaaatgtaatcaaacgagaatttcaattaccagataatttagaaccagtcaatatattagtcattggttatgggaaagaaacaccagcagacccagaacgtcattttgctacacgtattcctatggaagaattggtttcttacgactatttataaaaggtttgtaattgtaattttttagacaatgaaagtaacgggtcgtgaaaatgcttcacagaattgtgatctgcattatcacggctcttttactctctgtttactttcaaaactgtaagtgtaattgaatactgcccttactataatttaatcgtattccaaaacaaataaatgtggcaggaagaaaggagcgattttaatggaacacattttaaatttagaacaagtaaaaaaatactacgggggtaactctggaaatatcacaaaggcagtagacggtatttctatgtatgtagacaagggcgaatttgtcgcaataatgggagctagtggttctggaaagactaccctattaaactgtatctctacgattgataccgtaaccagcggacacattacagtcaacaatcaagatattaccaaaatcaaagataaagattttgctgatttcagacgtgaaaatctagggttcatttttcaagatttcaaccttttagataccttaacgattgaagaaaacatttctttgtcattggtaatcaacaaacagaaccctgctgatattgacaaacgagttcatgctatcgctgataaattgggtattcgtgatattttatcgaaatttccttatgaagtttctggcggacaaaaacagcgttgtgcttgtgcaagagccttaatcaatgaaccgaaactgatattagctgatgaaccgacgggagctttggactcaaaatcttccagattgttactggaaacaatgtctgacatcaacaagaaaatgcaggctactattttaatggtaacacatgacccgtttagtgcgtctttttgtaaacgtattttgttcttgaaagacggtaaaatattcaatgaaattttcagaggggaaaaaagcagaaaagatttcttcaatgaaatactggatatattaaccttgctcggaggtgaagtgggaaatgttaggtaaatatacaaaaagaagcattaaagattatttgatttatttgataactgttactatcgcattttctcttatatttgcttttaacttagtggcaagttctgaagaagtaatagaattatcgacaggcatggatacgtttaagtatattctagcttttgtgaatgttgttattatatttgttatctgttttttgattaactacaccacaaaatttatgtttgaaaagcgaagcaaagagcttggaacatatatgcttcttggaattagaaaaaaagaaattgctcgattgcttgtaattgaaaatgtgttattagcgatatgtgctttggttttggctattcctcttgggttcatatttagtcaatttgtatcattggtaattgtaaacttattaggtattccagaagtaatctttatttcaataaattttgtttccataggattgcttgctatttactttttggcaatatacgtattggttctgcttaatcttttacgaagaattagaaaaatgacggtacatgattttctttattttgataagcagaatgaaaagaaaatgttccgtagcaataaaaagagaaatattattttcattgttagtgttatattaggaattactgctattttgctttgggcttcacgttggacaatggaaaacagcggtaaacaagaaactcttacgtatttgatgattagcatgatgatgttgattatcagtatttatggtgtatcagctacttgtgcagatatgttgttgtcggttttattgaaaaataaaaaacttaaatatcaaaaagataacctttttgtaacaagaacttttgcgtcaaaagcaagaacaatgagttttacgttcgggacactttccatgttgatattactttctttgttatgtttaaatttttcaagtatcaataaaggagtgtataaagcaagcatagaaatgacagctccgtttgatgttcatgtgtttgaagaaaaacaaccatttaaagattttaaagaatatgtgaatgttgttgatgaagattatacaataaataaagcaatcgaatttgatgtttataaagaaccgaaacatcaaatgcagaattattttgacgtgcaattttatgattatgacccagtaatgaaattaagtgattataacgaaatactgaaattaaagaatatggacaccatagaattaagtaatgacgagtattttcttgtaactagcaaagatttgttatataaagttgaaaacaacaaggatattgaaaaaattcagttgacaagtggaaaagaattaaaactaaagggcattgatacaaaaacgtattggtatcaaataaataatactggaagatttgctgttattgtgcctgatgaatatgttcaaggcttggaagtatctgagcaacatctgattatagataccatagaagaaacagatacaaaacttagagaaaaaatcaaacaagatttgaaacatcgattagtaatagtaaatgatgatggtgaaacagtcgtacaatattatagactttctgtaagaggttctgctattgaagaacaaaatacgatgaccgctatgattgcaagcatttgtctttatattgcctttattttgatttcggcagttggaacagttcttgctattcaatcactaagtgactctacaaagtacaaataccgctatcaaacattaaaaagattgggagtgaatgataaatcattatttaaaacaatcagaaagcaattactaatattatttggtgttccagttatttattcaattcttgcaagtttctttatgctggtatcagtcaataatgtttataaaatttatttagaaagtgagtatagttatttaatttacttcgtagtaggtttggcgattttcttctttatctatggaatttattggatagcaacgtatatcggtttcaaacgaaatatcaatgaggagagttagatttttctagctctcctgctgtggaattattataatggtaaatcaagggggtgtggaaatgagaatagcaattatcgaagatgatgaaatcactcgtctggagctttctaaactattgaacacacaaggatatgaaacagtcttgttgactaactttgaaaatctgacagaggaattaaagcaatattgcgtagagctggttttgcttgatattaacctgccgtatgaaaatggctatgaagtatgcaggaaaataaaacaagctatgccagtacctattatctttgtaacaagcagagatacaaatgctgacgaattgaaaagtattcaagtgggtggaattgactttatcacaaagccgtatgacacgcttattcttcttgagaagatcaagcgtgcattgcagttatcaaacccgaacaatttccgtgagcttgtcaaaaaagattgtacccttgatttacatttatccattttgaagtatcaagagaaaagcattgaactgacaagaaatgaatttcgtatcttatactacttctttatgaatgaagataaagttattagcaaagaagaactattggaaaagctgtggaacgacaaatattatttagacgaaaatgtattactggttaatatgacccgtctaaaaaagaaaatgaaagaaatcggtattgttcatttattggaaaatatacgaggaaagggttggaaactgtgagcttttttacattcttagaagaaaaaataacagagatattgtttcagcttttctttcttgccttagtagtatttctcttgattttctacggtgtagatacgctatttgttgtattgctggtaattctgttcatcagcatacaaggtttttttcaatggtgtttgtatcggaagaaacgtaacgcttcacaacatattattgatttagtagacggactggaagaaacctattatattgcagacgttttaccaaagccaaaagaatttcaaaatgaagcctattactacgcactaaaaaaagcctgcaaatctatgaatgatgaaatcagtaaaatcacagaagaaaagcaggactatcaagaatatgtggaaagtttcgcccatgaaattaaaataccgataggggcattgtctttgacgtttgataatacgaaaaattatacgttaaaaaaagaaactgataagatatttcagttagtagagcaaatgctctattatgcaagaagtgaaaatacggaaaaagactactttgtaaaacagttaaatttagacgaagtgatacataatatcattttgaaattccgtcattcacttatggaaaggaaaacggttatcaatatccatgatatagagaatgttgtttataccgatgaaaaatggctgacattcattctatctcaaatcgtgcaaaatacgattaagtattttgacaagcaggaaaataaactgacgatatacagtcaagacaatgaaacaaatatactgcttgtgatagaagataatggctgtggaataaaagcgtcagacttatcaagagtatttgaaaagggttttactggttcaaatagaaacaaagcaaatgcaacgggcatgggactgtatttatcgaaaaaattatctgatagactaggtttgaaattagatattacttctaaagaaacggaatatacaagactgacaattacattcccaaaaggaacagtccataatttacattaagcattgaatagttgcttattgatgataaaacaaaggaagtgatacacatggagttatatcttaatgatgtttacccttatgcacaacaaatatcaaattatatagaacgagaaatttttcaacagaaattaaaagcaggtcaaaagctactttcaataacaaatttaagtaaagaattaaatgttagtaaacatacaattcaattatcttataaaatactgagaaagaaagagttaatcgtaaaaaaaggaaatgatttttttgttacaaaagataactgctgtataataacaaaaatgaaagaagaaacagatttacagataatcaaatgtctgcatgaattagcagaaatgggatattcaagagaacaaacaaaatccttgattttaagaaaattagaaactttaaaatttcctcaataagttcgattaggcattgcatagtattttgctgtaagggggcttgagttatggaatgttttaagtgcaattctttacaatttaattccacctaacagtacactattaaaaaataaatattatttagctttaaaagctcgtacagactatatgttttgtgcgggcttttttcatacccgaaaaaaacttaaaaatttttcaaaagaggtcattaaatcacacctagctgtccttatatggtgcggaaagagggataaacacttttcaaatcataaaggaaagggggtgagattgatgaaaccgtctgacttccagaaaacagttcaatgtcgttttgaaagttgtttaaagaaagttgttcgtagtgtcgtgaaagattattacaaggaattaaaccgtcgtaaaaataaagaaatatctttcagcgaattgccagatgtcattgttgataaaatgactgtttgggacgactacgaaacagattatacaatcttttcagtatgtggcattgatattcgtgtccttgatgatgaattggcagaagcattgaagaaacttccagaaagaaaacgcaatactctgttgatgtattactttttggaaatgacagaaagtgaaattgccaacttgcagaaaatcacgcaaagcggtgtatttagaaatcgacatcacgctttggaaattatgaaaaaaatactcaaggaggaacattagaaaatgaaacagttatttaaaaagccgtcctattacttgatttcatcagctatggacggaaacgaaaaagcgattgagaaattgctggcattttatgacccgtacatatcaaagtgctgtttacgttcactttatgacgaatatggcaatgtttatattgttgtagacatggaattaaaaggacgtatcagagaagcacttatcaaaatgattttaggttttaatattgaagatatggacttggaaccagaaaaataagcagtttttagcggagcatgatttaatgtccccctctttcctgctctgcccctgcttctacatgaaagcaacacgctttcgctacagctctttgacaactgaataaagcagacagatacgtttgtgagatagcgagccacgggaactgtacgccacgaccttttaaaagaaagcgagcgacccacgcagtgatccgagagcgactgttggaaaagtcgttttgccacgacctatcctcacagaataatgatacgtccgcatggtgcggttctgcccacaagaatgggaatagttgagatactaacggagttttccaaagccgtctgcctgcttgtaaaaaatgacacacagtaaagggggtgcatagattatgaacaatactgatgtgcctatctgggaaaaatatacgctgacgattgaagaagcgtctaaatacttccgcattggcgaaaagaaattgcgtaaattagccgaagaaaatcttgacgctggctgggttatcgtgaacggcaaccgtattcagattaagcgaaaacaatttgaaaaaatcatagatacattggacgaaatctaatgtcattgagccgtagatatggtataataaggtatagcgtatcacggctcattccatgacggaaaggagctttacactatgtctaatgtaaaacgaaaagacagtaaaaatcgcaatttgcgtaatggagagagccagcgaaaagacggaagatacgtttataaatataccgatatatacggaaagccacaatttatttattcttggaaacttgtaccgacagacaagacacctgctggaaaacgtgatgatatatcgttgagggaaaaagaaacacagataaaaaaagaccttaacgacggtatcgacacagcaggcggtaaaatgacagtctgccagctctacgacaagaagaacagccaaagaaagaacatcaaaagggctactgaaaaaggacgacagtatcttatgaacgctctgaaaaatgacccgttgggtatgagagcgattgataccgtcaagcagtcggacgctaaagaatgggctatcagaatgagtgaaaaaggatatgcctacaaaacgattgataactataagcgttccttgaaagcgtcattttacatggcgatacaagacgactgtatcagaaagaacccgtttgaatttaagctaagtgatgttctggaagatgatacggagcagaaagttatccttacaccagagcaggaagaacgcctgcttgcctttatggaaacggataagatttacagcaagtattatgatgagattgtgcttctgctggaaacgggacttcgtatttctgaattttgcggactgacgacgcatattgatatgcagaacagaatactcaatatagaccatcagttattgaaagatagcgaaatcggctactatattgaaacgccaaagaccaaaaacggaaaacgggaacttccattgacagaacgggcttatcaagcaatccaaagaatactaaagaacagaggaaaagcacaaccgctgattgtaggtggttacagcaattttctattcttaaaccgtgagggcttgcctaaagttgcaggaaactatgagggcatggtgcgaggactgattaagaagtataacaagtatcacacggacaagttaccgaacatcacaccacattcattccgacatacttattgtacgaatatggcaaacaaaggaatgaaccctaacactctgcaatatctcatgggacacgctaacataaccatgacacttggctattatgcacacggtacatttcaatctgcaaaagcagaactggaaagactggcttgttaatatcggagcttatatttactactcatttactacttttggttgcattttcatgctggtaaatgccagcttatgcaaggtatcttccaaaaagaaaataccgataaagccctaaaatacggaatatatcggcatttaccaacttatgaaaagataatcagaaatttagtaagtttttatataaaaaactcagttttttaattagtaaataaataagaactcgaaatatctttattcacggcagttcacaaagtcaacgggaaagttacaaggcttttttcatcatgaagccatgcttcatggtgaaatgagcggggtgcgagcgccccttggagccgttaggcgacctaagcgagcagtactttttctttggtgaagcgtttctttttcttacgagaaatagaaatggttcaaacaccattattatgtaataataaaattttttatatggggtcatatacaaagttaattttaataaatatttttttgatatattgaacactgcgtgttcagatgatggctcacctaacgaggcggcattagccgtgtttgagtattcatattattgacattgcaggtaatggcaaaacaagttagtatgtatcacacacacttttaaaaaaagtgtggtcacacctaccgatgttcactgaaaaccacaattttttatatattaatttaaaaagaaaactcagttttttaataagtaaaataataattaccataactaacaacggggcacgattaaaaatcggccccgttgtcttatttatttaaattttcacactttaaaatttaattgccaagcaaccatattaacctgctgttttatattgccgcgcaatttaattattctattatcctgtctatatcctctttcaccaatttaagaagctcattggcctcctcctcagtctcgcctttcatcaaacagtacagcttaattttcggctctgttcccgacggacgaattataaagttgttctggtcttcaagctcaagataaataacattagactttggcagaagtatcccgctcttttctcctgtcagcttatcaactctctcacttgtaagataatccctcacagcaataacctttttgcctgcaaccatctccggcggattctctctcagcctatccattgttgactttatctttgcaagcccctctattccctcaagcgttacagacacaacttcttctttatagtatccatacttcttgtagatgttgtccatctgctcaaatatagaagttccgttctcctggtaataaagcgccatttcagcaatcagcattgtcgcaacaaccgcatccttatcacgggcgtaggttcctttaagataaccatagctctcctcaaatccaaaaatgtacgttcctattccgttctcttccgactcttttatcttctcgccgataaacttaaaaccggtcagcacctctttcatttcaatgccataagcgtcgcaaatggcctgaattatattagtggtaactattgtttttactatgtatccgtcctttggaaccgcattcttttctgcaagagccgaaagaatatattccgaaagcagggttccaacctggtttcctgtaaaggtaacgtattcgcccttgtcattcttaaccaaaataccaactctgtcgctgtcggggtcagttcccactattaaatccgcaccgcattccttagcatatccgatggccagcttaaacccttccttattttcagggttcggggattctactgtagggaaatcgccgtcaggaagctcctgctccttcaccacaacgacattgttaaagcctatacgctttaatatctttctgacaggcttgttgcctgctccatggaaaggagtataaacaaatttcagggtgtcgcccttttctttagcgagctcaggattcacacactgcttttgaacttcgtccaaatatgcctcctcaacctcgtcgccaatcataacaatcatgccttggtctattgcctgctcaaaatccatctttttaacgccggtaaaaatatccgtctttcctatctcatcaagcacgattgttgcaagctccggattcagctgtgcgccgtctgagccataagccttgtatccgttatatttcgccggattatgactggccgttacagctatacctgctgtggtctttaagtatcttattgaaaacgacagctcaggaacgggcttaagctcctcaaacaaatacacctttatcccatttgcggccaatatctgcgccgcctctttggcaaacacatctgacttatgacggctgtcataagcgattacaacgcttaaatctgcgtcctttccatttgtttttattagctgattcgccaatccctgggtggcctggcccacaacatattcgttcattctgtttatgccggcgcccaaaacacctctaagtccggctgttccaaactccagcgtcttataaaagcggtcttttatttccgcgtcatcatctttaatgctctcaagttctgccaccgtttcagggtcagcttcatttatccatcttgcatattcatctaaatattccattttttgcgcctccgatttgtttaatttgtactatagagacattatactactaattcatggcaatttcaaccacttttaatgtagaaaaaaactgcggttttttgtatacatttctgaaagattagaagaggtataacaaactattttaaatatgttcacgctacgcgtgagatggcagctcacctaacgaggcagacgttgtctgccgcgtaaggcgcgcagtcacggagaaatttgtaatcaaaaagaattatgacaatccaccatatgtatattcacgcttcgcgtgagatgacagctcacctaacgaggcagacgttgtctgccctaccgatgttcactaaaagcgtgagatgcagggtaataattctaaaataactaattatataaaactgtggtatagcaagcttcggcagagtaaacgtagtttaccgcgtaaggcgcgcagtcacggagaaatttgtaatcaaaaagaattatgacaatccaccatatgtatgttcacgctatgcgtgagatggcagctcacctaacgaggtgtgcttacgcacaccctgccgatgttcgctaaaagctgtttgcttatatatacttattattttttatgtattattcttatcagtaattatttcgttagctatttgatataactttataactttatattatcacacatataaaatataaatttattcaactttatatataaaaataaccgcttcacattttagtgaagcggttgtttttattaatccattttgctgaattggtctttgccaactccgcaaagcggacatacgtaatcttcaggaaggtcttcccactttgttcccggagctatgccgttatccggctcgccttcagcttcatcatagatatatccacatatatcgcatacgtatttcatttctcttacctccaaaattatatattaattaattatttttcactctgccatactgaaatttccaacaaacattattagtttgcgctatctttattgaaaaatacattacatcaacaagaatagatataaaatagtaatgattactatatttgagattatataccatttcacattatttgtcaacagtttttttatatttttctttagccgtactaatctcatcacgttcccgctgtttgggttctttaatatcggcttttgcctttgccagcttttcagcatccctatcggcttcaattttatttttttcagcgtcattatctgttagattgggtgatttatcttttggcttcgtttttgccatgccgcttcttttataagctgtgactcctattaatatcaagagaccaaatgcgagcaataatatccccaaaatcttccaaatattgctgcgcctgtgaagcacggtaaactgtcctgccctgtcagtctcaaacaccaaataactgccgtccctttcggcgtctaatattttggtcttgccgtttataactattcctatacagtttccgtcctcatccttatcacggatatggacttttatttttccgctgtattccggggttatttcaaattcgtatgccgcaacagtcttatagtcgccggaataatccccgtccgcgtctgattcccatgcgtgaacctccgaaccgtctttaaaatttccctcaacgagcagcagaggcggttcttccgccgtccctaaagtctttacagcatccaaatactcagctttaaatacagtgtttcttcttatggggtctgaggtatccttatcccactgcgggcaatacccgtcgcgaggctcaatatcgggtatttcttcagagtttaaaacagtattgtagtctaccgtaaactctttgactgtctcctcatcaatatcaaatttcactttaaaatgaaaagccgcatattcagctgatttcgatttaatcaaagcgcctatatttgaagctgaattatcacttaataccctattttggggaagaaatatatctccgctccccatataccatgtatcgttgctgaatcctgtcatcttttcagggatattatccgctccggtcatttcagtataatccagagccacggcttttccttcataatcggtgccgtcaataccgctcagtccctcttttataaaatagttgttctgtaccacgccgcctgcggttcctgttattgcgccgctcttttcaacaacaccgtctattctaggcagagcgtaacaggttgctatagtatccccctctccggctatgccgccgacatggtcgctgccctttaaatctgaaatggctgcacaattatatatcttgccttttgaatatcccgcaatacctccaacatatcccccctcatcagaagttatattggtttcagtcacagaattttttattattccaaaagacgcgtcgccaaccactccgcctccgtagccgtttctcgaaaaaacttctccctcgcttatacatccgttaaccactgctttaactatagaagtcggagtaattatttttccgctgggaagagttacattatttccgtacttaaccgccgactctataccaatcgttccgcctattccgcccaagtctttttcacctgtcacttcgccgctgttgacgcagtacattacaagggcgtcgtcggtgttcattcctgccacatttcttgatatgtcgatatctacgctcgtcagattttttaatgtatccttgatttcatcctcatttaaatccagtttttcatccgcatacgctgtcatgaatatagtatccgatataacgcttcctaccgttttcggtttagcagtcggaaaaagtccgcttaatatatcattaaccttttcaatagcctgtttaatatctgttctgattttggtaatctgctcattggcggcgtcaatctgtgccttcgcattctttaatattgtctccgcctgctttaacggtccgcttatggcgtccgcaatatcattggagtcatttcttatagagtttaaggttcttgtaacagcattcagcgatgaagttatactgcttgaaatagggtcgagcatagtatcctgaatataatccagcctgccgtctaaagagtcaagcctgtcgctcaaagtctgccagtctccgtcgttgtaagcgtcatttacatcggttatcagattatcaacgtcctgcagaacatcatttaaactctcacctgcccggttggcggtatctatggtattattaatagaatccagcgcttcccctaacgaccctttagtctcatcgttaagctgatccaaaagtaaacttcccgactcagaaagccctcccaagtcatcacttatctctcttgccgaatccgagagactgtccagcaatcctgtcaggcttccgctgtcagacgagctaattctgtcacgtatcgcgtccaaaagcccggtttgactgctagtcaaactgtccaaagctcctgacaatgacgactttgttccgctcagccccaaaagatttgaaagaagtccgccgccgccaaaaaatccaaatctgtcaagaactccgtttatatcagtgtttaacctatcccgcagactgtctatatcgttaatggtattattccagctgtcgtcaatatcactcttcacgttttcacgaatctcgttcacatcgtcctttactctgtccaaatcttctatgcttatatcagtgtaaggctcaaatctgccgaaaattccgcccacgcttttagacccgaatatatcacctatattctgacactctataacacagcccgactggtttccaacaattccgccgatatttatccctacatttttatagccgatttcagcgtcattcaggcaattttcaagcacgccgtcgtttatcccgcaaattccgccaatgttatggctctcctccaccggagatgaatttactttgcccgaattcttggatgacttgacccagccgtaattctttccgacaactccgccggtgtctttgtttcccaaaacagaactgacattgtaacacgcttcaatatatccgttctcctcattctgtccgactattccgccgactatagcgtctccctcaatctcgccgtcaaaggaacaatttatcactctgccctggtttttgccgactattcctcccaaaactgagatagaattctcgtttattatgtctgtgcttattccggcattctttaccacgcttcctataacgtcgctgatagacgcggctccgtcagtaacctttttcgcttttactttacccgaaatattgaggttgcgtatttctcctccctcgccgagttcaaaacacagtccttttgcagatccgtcaaagtttaaatctatattggttatacggtgaccgcctccctcgaatgtgccgcagaatattttcataggctcaaactcggttcctgacatatctatatcattcagcaaagtaacctgcattccgcgggaatagctgtcatacacacaatttttagcaagcgccgcaaaatctcccggcgttgatatggttattaccggggcggttccttctccctccgccaaacaaatatattctgccggacaggaaacaaggatgaccagcgccgccataaacgcaagaaccctgcgaagattttctgatattctattcattacaaatcacctctttttgactattttactgcttctgctcgtcttccggaccgctcatattctcaactatcgctttaacatcgccctttaccattccgtgaattgttccgtttacgtatccgtttatatagccttttactcttccgtcaacataaactataccggtgcgttcctttttctctttcttttttaatgtaaacgctcccttttcgaccagcttatcaaatagcaccatgatttgcggaagcagcgtcattaccaagattatagagataagtgttccgcgccccaaacattttcccaaagccgaaataaccgggttggttgaaataaaccctatcaggaagccggcaatcatcattatcaatcccgatgtcaaaatcgttgggaacgcgccgtttatagcttctattgcggcggcttttttaccaatctccggctttagttcaagatacctgttggtgaacactatagcataatctatagtcgctcccatctgaattgagcttaccaccaggtaccccaggaaatacagcttctcattcataaggtatgggaacgagaagtttatccatatactgccctgtattgtaagcaccagcagaactggaactgatgaagacttgaaggtcgccagcagaatcagcagcactgaaataattgtaaaaaggttgattttctgattatcgccgctgaatgacgattttaaatcaagagctgaaatagcgttgctgacaagaataggatcgtcataatacctctttgcttcctcgcgcactttatcgtgcagagctataacttcgtcgctctcgttctttcccttatatgtaaacacaagccttgaatactcttctccctcaagctgatctctggcgtctgacaccttgtcataaacctcgtttatgtccgaattcttttcctcacccaaatctataacgccatagtccatctgttcgtgaacaaacatcagtatatccataatagacacggtataactgtccacgtcctggaatattggggtatactgcgacactgaagcgccgtaagcctgaaacagaactctggaagttgcaatatccaaactcatcaggtcagcaaactgtctcggagtaaccttgtcagtcaggcaataatcatcgtctacctctacgtttgccagtcccaatgcagtagaaatgccgtcgtattcttcaacatcctgaagtattttcttttccttatcatagctccctttcggcactatcactgcaagctgtccgccgacgtcaaaattttcttttattttgttctctgcctttttgctgtcgctcagcctcggactggacacagaatcctgatcgaaagcgtattgacacatagacgacagaaatattgaagacactattaccaacgcaaaaattattggaacgaaagaccttgttttcataacaatctttccccaaaaagatatatcaggcacataatttttatgaacggttttgtctatagcgtttgaaaacatatacaaaagtccgggcataagcaggaacactgttataagagaacatataattcccttacagagcacaagacccaaatctttgcctataccaagctgcatcgtcataagcgccgccagtcctgccacagtagtaagactgctggaactgatttctataatcgctttagacagcgccgccactatggcgtcatgtgaatttttagtctgcttttcttccgcaaacctgtgtgacaaaataatagcgtaatctattgccagggcaagctgaagaacgattgccaccgagttagatataaatgatatggtaccgagcagatagtttgttcccatatttaaaacagcagcaactataaacactatcaaaaatactgcaacgtccataaatgatttagaagtaaacagcagcatcaaaactataataatagccacatacattattatttgtctcatgtccgccgccaaactgtcagacgagttgtcaatcgacgcagaatatgtataacagtcatactcagcaaacttatcttttacctcattctctatttctatctcacgctcattgtcaagaccgctgtccagagttaccgtatatatagctgaagagtttttataatggtcctcgctgtcgtcgaactcaacttcttttacgccgcccacctcttcaatcttgtctgtcattttttctgcctggttatatggaatatttgaaatcatcagtgaaaaagtgtcgtgagtaacaaattccctgtccatcaaatcaagcccttgctttgtttcagtcgactcaggcaaatacgctgaaatatcattttcaacctgaactttaggaatacaaattgcgcagaacacaaaagcaatagcaaacaacagataaaatgcttttcttttgtctactataaacagcgctactttttccattatattctcatctgaatttttcacggtatcactccattcaaatctactcttaacaatattatattctgccgcctgcatactgctataccggcgcttcttcgtctatttcacagagtaagtataataccattccgagctttattcaatagacaaacactatattttgtcgtataacttaatttttgtataaaatatacaatcatgtctataattatatgttatttatttacttgacatgtgtctgtttttattctataatgtatgctgtaatagtacatttatgaatatattttgttgaggtgagaataatgcaggagaatcaaaaaaaggaggacctcagaattaggaggaccaaaaagctgctttctaacgcactttttgaattgattaagaaaaaaccatttgacaaagtgtcggtctgtgatatttgtgacgcggcaatggttcaccgcgcaaccttttattcacatttcagcgacaaatacgaacttttgacctacagcatagacgaacatatcccgcttgacaaactggaattttccgctcacggaaccgatggagcagtaaatcccgaaaaagttgttggtgatattataaattacgttgcaagcaataaggatatatatgcttccatactaaaaaagaacaacgactattctattcccgacaggattcaggatttgtttgaagaaaaaatattaaaaattgtgaacagagccgttgaaaacggcgaagagattcctgttaaaccggaatttttggcaagcttttattccggcgcctgtctaaacgttgttaccaagtggctccagggcggtatgcccctcactgcggacgaacttatcggtaacttaaacacacttttatccttatcccatattcattaatacaaattctacaaaaattatatttttgcttgatttttatcctaatccgtgctataattcctttttgtaacagatatgtaacatttctgtaacaatcaaaactaactttggaaggaattataatgatttttgacagaataagaaaaatggcaaaagatatattcaagcccaaactggcggcggttctaacagccggcgttatgattatggggtgtgttccggcttttgcgatagagtcggaatatgattatgattttcagattgacgtttccgcattttcaaacgcagagctcggaaccatatcctctgacactccgagcggaacgacagctgatattactttaaacggaaaccagctttatataaacggccatgagaaatatttagactcgccgatgctttatgccaacgacacgctgatgctggccttgacatcaatgcagaattttatggagtgtaaagtctattatgacccggcgttatacactgcctatattattaaaggcgaatattctatcagaatagcgcttggaagcaatttggctataattaacaatgcatacacagagtactgggacgagccgctgataaactatgacggcacgctgtatgttcccctcaaatccttaatggattcactgtggtatacaactgatatgtcatataacggaagcgtgaatataatcagtcatgctcccgaaaactatcaatacagttatgtcggcggagttcatgttgtgtacattgacccgctgaatatcaaagctgaggctattgttaacaaatccgccgaaagctcagggaaagctaactacagcaattcttcattcttcggctgggaagcaacaggaaacacatattcggttggcattattgtaagcgacggacagattatctctaattatgcgacgcacggctatccggtaaccacgcttattgtacactatgacggttctgttgaagtaaagcaggtctatgacataacgactgagaacaatgttatgtttgcggtcagcggatgcggcgttctgccgaaagtcatgtcctcagaagagggttttgtcggagcatttgatattgacagatacaccaatagaacttatattggctacaacccggaaatgggcaagatagtgctgtgcgtaagctcatctaccacgctggctcgtgccggtcaggtattatctgatttaggatgtgtgggaggtttggcactggacggcggaggaagcgcggcgcttgggctaagcaatggaactaagttcagttcggacggaagaaagcagtatgctgttttatattgggaataaatattatatagccggagaagttctccggctatttttattttaatgcagaaagattaattgtaaatctaatcaatacgctgtttaaaaggtgattattatataataactacatatatctaagaaataataaaaaacagcataaatttattttatggtaatctcttttatatatgcgtttatataaaaacatataagctatttagttataatcttataccacaatttactctttaaattcaccgtaaatatcaccgcttcttgttatttcttatataatatcgctaaggctgaatagaaagcaatatagaattcgggtgattatgccatccctccgcaataaaaggagatgataacttatagtttagaatgacataatttatttaatagtatttctcttgttaattatataaataaaaatctaaaatagcttgagttaacttttatctaatacttttgcacgaccgtataaaatcctgccttttatcttacatcctttaactttgtctgcttatgtattatttgcttataaaatatatgtacagaatatatgggtcattatcaacaaattattaaagtttctaagagattaggctaataaaataatgcccacaaataaaagaagaattaattttgaacactaaatttgggtataactttttttatgatttttatatcttattaaaaacattattgtctcgtttatttttattgctatttatttaatatataagtaattaaatagattaaaactattaacccctataacgactctttatataactatcttttaatctagagaatatgtatcttttctacatcatagaaacaaaataaaatttttactttaatttattctattttatgtaggtttgtcaatgatgtgttacaaaaaagattaaaagagttcaccgaaattgataaaagagttgatgtagtcaattggagctttccaattactgataattaatcttatagaaagttataaagataataataaaagatattaacaaatccgcgactgcgcacctaacgaggcgcataaatgcgccctaccgatgtttgccaaaacaacagtttttattagagaaaataaataatatatcggaatatctttattcacggcagttcacaaagtcaacgggaaagttacaaggctttttcatcttgaaacgcagattcaagatgaaattagcgtgggcgagcgccccttggagccgtaggcgacctaagcgagcagtactttttctttggtgaagcgtttctttttcttgccagaaaaagaaatggttcatacaccttattatgtaataataaatttttttatatggggtcatatataaagttaatttttatgaatatttacttgatatattgaacactgcgtgttcagatgatagctcacctaacgaggcgcataaatgcgccctcccgatgttcactacatacccagtcttttgtgtaataattaaatgattcaaacacctattataagtaaaataattattattatatggggtcatatacaaagttaattataataaatagtttctttatatattgaacactacgtgttcagataatagctcacctaacgtgcttgttaacatacatcacaactaagcaatttattgacattgtaggttaaacaaaacaaattaatttggttcacacgcacctaaaaggtgcggtcgcaacaagcctaccgatgttcactgaaaaacccgcttttttataataatcaaatagtttgctttttaacatatggtttaatatattagtattttagtagaattatagagtattataaaatcttatatttaatttttatcaaaaatatgttataattgtttaagaagcagataaaggagcggttattatgtttacactcgctcataaaattaaatataagctaactcaatttttggccgctctgccatttggcaggagacgctgtataatttgcggcaaaaaatctctctattttttaccttgcggtcaaaatgaggatatatttcaaaagataaatattatcggcggcggatggagaaaaaactgtaagtgtcctcattgtaagtctttagacagatatcggtggacgtggtatgttatcgtgaattttacagacattttatcaactgaatgtaaagttctgcatatagctcctgaaccgcaaatagcccaaaagataaaaaagataaatccgaattgtacttacataaccggtgatttagctaaagggcgcgcagactatattatggatataacaaatcttacagctggaagtaatacatttgactacgtgattattaatcatgttttggaacatatttctgacgaaaatgctgcgctctcagaaataaaacgagtattaaaaccggacggaaaatttttgttttttattcctattgcgaaagacagaaaaacttttgaggataaaacaatcacttcctccgcttccagaattaaagcctttggtcaagacgaccattgccggctttacggcaatgatgttttaaaacattttgaatcttttggatttaaaatacaaatatacacccctcaagaattattagaaccctctaatatcaagaaattgggctttcttcccgatgacaggctgttttcagcggaattaaacaaatcaagtgaatttgcagataataattttcagaacattttgttgtaatattaagataaggcagataaaaatagtgattttgattacaagtcactatataagtttttatttaagatataaaacaaatttcatattataaaaaacttatttattaaaagcaaatagaaacaatattacggcttcaataatacctttactgaattcttacatcataaaattcataataaattactaactgtatctaatttttaaaaataattttacatacctcaacagcaggacagcatattactgacctgctgtttttatatacactgcttattttataataatatctaaaaaatcatagatatatttcggttccatataaagagcctcgcacaacctggtaaatctaagagctttttttgcctcatcaaataaatccggtaggtattcaacacatttgctgtctttataaacctttactgcatacgacgtgtaactgccaatgtctatatgatggtagctttctttttcatatgtatatctatatatcataccgcagactgtccccgccggcacacattcttatttttcgagtgtatattatgatacataattctataaatatcaaaaacattgatgtattttaaatgaaactttgaatctaaactttctaaatacacttaacttcgcatccttagtcaaccttaaatgtttacaatatccatttctctgtttggatccatatccggaattacatagccgttagctattaatttatctacaaaatcatctattttgacatcaaatatttttaatatattaataaaatttaatactgttggaacacatcttccattttctaaatttgcatactgcctgcaggagattctgcatatctcagccataacctcctgacttatttcatattctgaccttatttcatataaaagcccgccaaatgttgatttaactatcttttccatttcaatattgttcattaaattcactcctgacaaaatatagaataattttatcagaatttgccatattttaacaggtaacacatttcagaaaaacgcttttagataacgaaatatattcacttaatttgataaaatatattcaaaatatataaaaggcaaaaattagtccattatatgaatgcaaaaaatcatttcattaaaaataagatactataaaaaattttattttcccgattaatatttataatatgtaaaccacagctaaaagctgtggtttaaaaactttaacttattttctcagcctgcatcttattgaatcagaaaaaatgcgttttcactcggcggcaaaccgggttcggtttgttttgccaatattgcgtctcctttagtaattgtcacattaaccggaacatttacactccagtttccgcaaacatcaactgccgtataaacttgagttccgtcagaaaatgtcactgttatttcagcccccggaacaccggtgccgtttacacccctgtaacattcacttacagacgtaatgaccggacgctgactacgctcctcccgagtattataaaccttaaaattctgaatcgggatcccattaaccgttattgaaccattattagacacaataacatcatacatcttattatccagcttataaccgtcaggcgctattgtttctctcatggtatatattcccggaacaagtgtgccaaagtctacattgccattataatccgaaaccgctcttgcgccatttgaaagtctaaattctgcccctgcaagtcctaatgtgccgttttggtcagtctttttaaaagttagtccttcagacggctgattttctattttgaattcacccataggaattccattgattgttattttaccacaattagatacttcgacataataaacccgtgtattcggcacgtatccacccgggacactgctttcaaccaaggtgtattttcccggagacagattgttaaatctaactgtgccattaataccggataccgctttctgaccatcagacaacgtaaatacggcgccctgtactggcaaacctgttacggaattaacttttaaaaaagataatgatataagcggattattacataactcaccgcattctgaactctttccgtctattattacctttccgtttggttcaactattatctgatgaaccttgtcatccaactggtatccgtcagctgctgatacttccgccaattggtagcaccccggcataattgacgaaaaattcagcgaaccatctgtacctgatgttacagtttcaattacttttccattcttgcatattgcataagacgccccggatattggttcgccggttacacaattacggacataaatagtaaacgaaacatcttcaggctggttgcacggataattgccgcactgacagcatgctttacagcaatggcagtttggacagcgtgcttgacgacgattacatacattacaaagtgttgacatattactaccccctcctttccatattatgtctattctccatttttcgttcttttttttcttaaaaaatctacattattttatgccatatccatattataaaaaagtaacctatttactataaagctcttagacaaataaaaaagaacacatttcatgtagtgatcaatcacaaataaaacatgttctttttatctttactctttgcaaaatggctaaatttcacataatatgaacaaacaaaaatctgaacagaagaattttattttttcattcccctttaaaaaataacacaactcctctaaacgttaaattcaatccttatgacaatattttgacattccgcagctgtcgcatccacatccgcaagaacctttgccgcgttttttcttcctgaccaagtgtattactattgcagacacaatggccaaaagaataattgaaactattattgttgaaatcataaaatcacctctaaactctcataacttttctgttaacctttaagatatttgattcttttccgggtctcaacagcagatatatgaatgctgcaataatcaatagagctgccaccgtccacacaccaaactctccgcccgtgaacaagtttccgatttgataaattgcaagggctgcagtataagcaaatactgtctggtatccgattgcaaaccaagtccatttagcgctgttcatctcgcgcttaatagctcctattgctgcaaaacacggcgcgcaaagcaaattaaacactaagaaagagtaagctgctatcgcggtatagcttgcagctaaggagctccaaatctctgctccgtcttccgcaacttcgccaaacccatataaaactccaaaagttccgacaacattctctttcgcaatcaaacctgtaacagcggcaacagcggctttccagtcaccccatccaagaggcgcaaatattggggcgataactccgcctatctttgcaagcactgagttatttaagtcttctaccattccaaagcttccgtcctcaaatccaaagccctgaaggaaccatagaactatggttgacagcaatattattgttccggctttctttataaacgaccagccgcgttcccacatacttcttaaaacatttgtcactgtaggcagatgatactgcggcagctccataacaaacggagccggatccccggaaaacatctttgtctttttaaggataatacctgaaaccacaatagccgctataccaacaaaataggcgcttggtgcaacccaccatgccccgccgaacagagctcctgctatcaatgctataatcggcagcttagctccgcagggtataaatgtggtagtcattatagtcatcttcctgtcgcggtcattctcgatagttcgtgaggccataatacccggaacaccacaaccgcttcctatcagcataggtataaaagatttgcctgacaaaccaaactttctaaaaattctatccataataaatgcaatccttgccatatatccgcagtcttctaaaaacgcaaggaatataaacaatacaagcatctgaggcacaaatccaagaacagctccgactccggcaactataccttcaaggataagactgtttatccaatcagctgtacctattgcattcagcaggtttttcaacaaaaccggtattcctggaacccaaatgccaaatagattccagccttcgccgaacacaccgtcatttgcccagtcagtggcccaagcacctacagtggttaccgacacataatacactatcaacataaccacagcaaaaatcggcagtgccagccagcggtttgttaccactctgtctattttatcagaagctgtaagctttttcttcttatttttcttataacatccgccaataattgacgatatgtacttgtatctggcgtctgtgataatactttcagcgtcatcatccaattctttttcagctttagacactatatccgagacatcaggaactatattcattaaattcctaattttattatcgccctcaaaaagctttatagcatagaatctcttttgttcatcaggaacatttataccaattcttttttcgatttctgacagccactcttcaagacggttgtcaaaactatgtaatatcttaacgccgctgtttcttttcgctgtctttacagctttctccgcggcttcctttactccatttcctttcaaagccgaaaccggaaccacttcgcatcccaattcttttcccagtttgccgaaatctattgtatcaccgctcttttcaactacgtccatcatgttaacagcgacaacaacaggaattccaagttcaataagctgagttgtcaaatataaattacgctcaatattactgccgtctacgatatttaaaatcacatcaggatgatcattaatcaaatagtttctagctaccacctcttcaagagtatacggagaaagtgaatatattccaggcaaatccataatacctacgtctttatgacctttaagttttccctctttcttctcaacagttactcccgtccagtttcccacaaactggttcgcacccgtaagggcattgaacattgttgttttcccggaattaggatttccggcaagcgcaatttttattgacatctgcatttacctcctatattacagccgtatgaaccggctgcaaccaaataattttagtttacttcaatcatttcggcgtctgactttctgatagaaagctcgtagcccctaaccgaaatttcaaccggatctcccagcggagccagtttgcggacaaaaacatcagttcctttagttatacccatgtccataattcttctcttaactgcaccttctccgcggagctttgaaattctgacagtctccccaactttcgcgtctcttaacgttctcattttaacatctccttttaatttttaaaccatgattctgtttgccattgatttatcaatagctatcctggtatctttaacattgataatcatattgcctgataactcagaaacgacagttatttcaaccccttcaacaaatcctaaattttgaagaaaccttctgacttcatccttaccgcctacttttataactctctttttctcaccaatctcagccatagacaaaggcatcatgcttcccctcctttcaaaaaatatcttatttttattatatttaaattgatattagttagctaatactaaccatacggtataaaatatagttagctcgcgctaacctctataaaaagtatatcatcgctccataaacctgtcaagcaaattctaataaaaaagtgtttttttgtctatttgcataattttgttaaaaataaaaggcaaaacatagttagtgtttgctaactatatataatcatacagattaaattttaacggcacagaatttaaactgttaatccattctatgtatcacaatacgacatattttaaaaattatttataagtttacacaaactcttctgtgtttagaaatgacttaatttttagtaagctttttataacatatttctattaagctgtgcatttagaatttcactaaagtgcacaggtcagatagaattaataatataaattttctataaacattccgtaggccgcttgacagtgcaaataatcctctatataatttttatatattacagaacggagaataaaaatgaagaaaattttactactggaagacgatgcgagccttatagacggattgaaatattcgttaagtaaaaatggtttttctgctgattttgttggtactgttaaggaagctaagatatttttaaaaactgaaaaatacgacttgcttcttcttgatgttactcttcccgacggcacaggttttgaaatatgtgattttgtcagaaacaccgggaatacagtccccatcatctttctcactgcttctgacgaggaggtcaatgtaattcggggcctcgacagcggagctgacgattatattacaaagccttttaaactggccgaactgttttcaagaataaatgcactattacgcagaaccggtataacagcacaaaaatataatgaaacttcagttaaatgcggagatgtaacagctgacttattaaagcatactataattttaaacggaaaaactcttgaattgaccggcgcagaatataaactcctgctaattctgatacgaaacgctaatatagttgtaaccagaaatatgatattaaacgagctgtgggactgtgatgaaaaatttgttgacgataacaccctttcggtatatatccacagactgcgcaaaaaaattgaaaatgatccgtcaaaaccacagcatttacttactgtcagaggattcggctacaaatggaacgaggtggggttatgagtattttttatgaaaaagaaacccggaacttttgtgtttctgtcgtgttaattatcttatttttgtttgtgctcgaaactattttgtgcatataccaaaaagacatcattcaaaagatttttgtatcccacgaccaatctatcacggctgcgttattggaaaatggtgtttctgaaaagataatagctgaatctttgacaaacacaacaaaaagtcctcaaagttatgagcttttaaataaactcggaataaccgaaaaaactgactcaagatttttaccttttgtttcagactttcaggtcaaatcaaaaacatttatatttctgataacatctgtattttttcttttgttggctatattaattattatttttttatataaaagagaccaaatttataaaagagcaatacaaaccgttacctgctacacaaaaggagatttttcttcaaaactccctcaactaaaaaacggaaccatttatcatctattcaattccattaacgatatggctgctgctctaaaatccaaacaggaggctgaacataaaacaaaagaatttttaaaaaatatgatttctgatatatcacatcagcttaaaacgccgcttgccgcactaaagatgtataatgaaatagtattggacgaaccgtataacactgagaccgttaaaatttttactgaaaaatcatcctcttccattatacgaattgaacagcttatatcttcacttttaaaaattgcccgttttgattccggcagtattgaatttaataaatctgaatacacattaaacgaaattgtttatcagtcaataaacgaattgacaaccagggcaaaacatgagaacaaagaaatttcaataaatggctctgtaaaagataaaatattttgtgatagacagtggacggcagaagcgttgagcaatatagtaaaaaacgccttggatcacaccgacgcaggcggacatataaaaattgagtggaaaaactccccaatatttactcaaatttttatttccgacgatggctccgggatttctacagaagatatccattatatatttaaacgattttataggggaatcgtaccaacccaaaacaataatacctccggaataggtctcggtcttcctctcgctaattcaattattgagggacaaggcggaaacatcacagtaaaaagcgagttaaatgccggaacaacttttacattgaccttctttaaatagtatatcttacaaaactgtaagataaaattcacgctatagtaagccgcgctttgtattctcagtaaaaggaggtatttaacttatggaaatcttaaaagtacaaaatctgagtaaaacctatggaaacggagagacacgtgtagatgcgttaaaaaatgtctcattcaccatgaacaaaggggaatttgcagcagttgtcggagaatccggttcaggaaaaagcaccctattaaattgcataggcggtcttgaaacgccaacatcggggaaaatatatataaacaacgatgacatatttaaaatgaaagagcaaaaaagaactattttcaggagaagaaacatcggttttgtttttcagtcttttcagcttattcccgagttaaacgttgagcaaaatattatctttcctctattactggactataaaaaaccggacaaaaaagacgttgacgaaattcttaacgtgcttgggctttcgaacagacgtaagcatctgcccagccaattatccggcggtcaacagcaaagagtcgcaatagggcgagccatgataacaagacccatgttgattttggctgacgaaccaaccggaaaccttgacagtcaaaacagttccgacgttatagaacttttaacaagagcttctaaaatattcagacagaccattttaatgattactcacaacgtaagtcttacttcatctgcagacagagtattccatgtagccgacggcgttctcactgatttgggaggtgataataatgaaaagttatcttagccttatccctatttcagccaagatcaataaaaaacaaaataaaatgactatggtatgtatcatactcgcagtttttcttgtaaccgccatattcagcatggctgatatggaaattagaagccagaaaataaaagcaatcaaagactatggaaactggcatatagcattgaaaaacatatcagaaaaagatgccgggatactttctgcacgatcggatattgctgcggcttcttggtataatactttaaattaccgtttaaaagacggatattttattaacggtaaagacgcggtgatatgcggaacagaacaatcgctgctcaatgatataatgcctgactctatagaagaaggacaatatccaaccgatgataatcagatcattctgacccaaaatgctaaggatatactaaaagtatctataggcgatactatcgagattaatctaccttcaggcgagagaataaattatattatttccgggttcggcatggacagttctatgatttcacaagctgacgcaatcggcgcctttctgccaatgcctgcttttaaaaatatttatagctctgctgaagattcagatatgatatattacgtccaatttgacaaaaacgtaaacattcgcagagcaatcgaagatataaagaaacaatatggattcaccgaagataatatttctcgcaataccgctcttttaggtactatgggatacagcaatgattcatatatgctaggtctttatggctcagcttttgtattgtttttgttggtgctgattgccggagttttaatgatagcaagcagtttaaacagtaatatatcacagcggacgaaatttttcgggatgttaaggtgtattggcgccgaaaaaaagcaaataatacgctttgtgcgccttgaagccttaaactggtgcaaagctgcaataccaatcggagttatcctgggagttttagttgtatgggttctttgttccttgttaaaatttttaagcggcagttattttgaagatatgcctgttttcggaataagttatttgggaattatatcaggaatagctgtcggtctcctcaccgttttgatttccgctcagtcaccggcaaaaaaagctgcaaaagtatcgccgctttcagcaataacaggcagttataacaatactaaaaatgtataccatgctgccggcacaaacttatttaaagtagacaccgggcttggtatatatcacgctaaaatgaatataaaaaattttattctaatgacaggttcctttgcattaagcattgttttatttcttgctttctcagctgttgtgagttttatgaatcatgctataaaaccgcttaagccatatacacctgacgtatcaattataagtccggataacacatgttccgtaaacagagacctaaccgctgaactatccggtttgcgtagcgttaagcgagtttatggacgttcatttaaatataatatgcccgtaaaaataaacggaagcgacagaaaaatagatttaatatcctacgaatccaatcaatttaattgggctgataaaaaaaattatatattagaaggggatttatcaaaggttctcggcaatagtgattatgtgcttgctgtatacagtaatgaaaattctttgcatacaggagataaaataaacctaggaaacgaaacagtttcaatatccggagttctttctacctgcccttttgaaagtgaacaaggaactgagacaattatctgttcagaagaaacttttaaaagaataaccggtgaaaagaattatactataattgatattcagctcacaaatcaagcgactgatgctgatgtaaactatattcgcggtttagccggttctgatataacattttctgaccgccgcctaagcaataaggaagtcaggggggcatttttggcatttgccttatttatatacgggttcatattaatcatcgctctaattaccgtattcaacataataaacagtatctctatgagcgtatcctcaaagattaaacaatacgcctctatgatagcaataggaatggaaaaaagacaaacagtcaaaatgataacagcagaagcagtcacttatgccgtaacaggcagcattctgggaagcgtcctggggcttccaattcataaatttatgttcagctttcttgttacgcaacattggggagatacttggcaaataccgttatcagcactgtttataattatatttgtggttctgttatcatcctttgcagcagtttacggtccggcaaaaagaatacatgatttagaaattgccgccgttataaacactcaataaataaaaataccgcaaaaaattcctataatcaggatgtaaaaaaaagacatgtgtttgatgcaatcaccgattgtcagatatttggttctaacttttggaaaaccattaagttcacctaaaacgcatgtcttttcttatatatatgaattaaatatttaaatataagataatctcattacgataccctaaaaataaatccaatttaaaaggtcatacttgtctcctcaattcaatatacttatatatactcaaacggaaaggaggaaataatataaccgcacggttatattataaatatagtatgagagaagaactgaggagaagaggttctttttccgagccaaaccgcaagaacaatataaagaatgaccgttttgaattaagaatgaaacttatattaaaacaatctatcgccgtggcggtaataataatcggcggtatacttataaacaggtcgggattcgagtttggacgaaactgtatatccgctcttggaagagctgtaagatataattttgactttattggtctctggaacagcatttgtggatttttttcagaaatatggcaattctggagtgaaatattttgaagaagttaaaaaacattttttctgctctccaaacacacctctggcttataccaataggcagtcaccttgcagtaagcccgctgttttttttactggccgccgcttcaatcttaggcggctacggaaaccttttctttattgcatatatctccgcttttctgcatgaattgtcccatgtgttttgcgggaaaaaacttggcgtatctatcgtcagaatcgaaattctgccatttggaatatgcggaaaattaagcgccgggttcattaaaaatccatacaaagaagctgtaatcgccgcagccggacctgcattcagcggcgcactggcagcactgctctatatgctaaacaaaaatccaatgctgtctgtatacagtgaagctatagactacggtataaaaataaacctgtctcttatgatacttaacctagtgccggctcttccgttagacggcggacgaatagcaaaagctattatatcaataaatttaggagccgttcgagcctcaaacttaatgctgaaaatcagcagagtgccaataatcggaatgctgcttgtttcagtatggttgctccttaccaacgacttcaatctgtcgctgatacttataggcgcttttctgctgggaaacttgagtattgaacaaaaaaatatatcattaatatcactgaaagaaatattgtattacaaaacacggcttaaaagaaccgaattttgtcaggttacaagaatggcagcccatgaatcagttcccgcaagactgttcctgcggaaactgggctgctataaatatcatataattgacgtcatagatgacgatggaaaaataacaaaaactgtaacagaaggacagcttttaaacgcacttataagtaagagcataaggctgtcaatgggtgaaatataaaagggtctaatctccgaaacagatacctagttctctgcctgttacaacctcgttggaaccggggctgacgcatttcagttttccggcaacctcgctcagaggaaccggaacaatttcattattctgcaaagccaccatatagccatatttattctcggaaatgagctgagcggcactggttccaatcctggttgtaaagactctgtcatacggacaagggcttcctcctctttgaaagtgcccgggaacacatacgcggatttcatgattaaacttttcttttatctcatccgccacgcgataagcaattgaaggctgtaccatctcagcccttctctgtttaagttctttctttttcaaagcggcctcctcttttgaaatagcaccttccgccacggctataatagaaaacttcttgccggatttttctcttttgttaagctcggcaaccacactgtctatatcataaggaatttccggcagcagaataacgtccgctcctccggcaagaccggcataaagagtcagccagcccactttgtgtcccataacctcaacgataaacactctgccatgagacgtggctgtagtatgaatcctgtctataacatccgttataacattaagcgcactatagaaaccgaacgtcatatctgttccccaaatatcattatctattgtctttggaagaccaataatatttagaccttcctcgctcagtaaattcgcagtcttatgagtgccgtttccgcccagtacgacaagacagtttaaccccattttcatataggtatctttcatcttctgaaccttgtctacattattctcatcaacatccctcattctcttaaacggctgacgcgatgtccctaaaatagttcctccaattgtcagaatccctgaaaagtcgcggggttccatttttttatactcgccctctatcagaccataataaccgtcctgaattccataaatctcaacatcgttctggaatcgctcatataaggcttttccaacagcgcgaatggcagaattcagcccctggcaatcgcctccgcttgtaagaatcccaattcttctcataattattcctccaattttctgttaaacagatttaatatcattttcaccaaaattcacagatttactcaaatacttttaggccctctttttcactgatgtaaatctcagttcggtgtatatcataacttattatatttatttccggcgctagatagtccgacaacgcctttaccgcaatttcaggttttaagtttttttgacctccggcagacaaaattagttccatttgcagtatactgccgtcactgctttctgaatgttccgaaatactgtaatcaattatgaaatccattaaatttacaggctgttcgcctttctttttggtctttttcataatcgtatattccggcatatcaaaaaatcccttgactttttcatcggctatgaccttatccgatataattttaacctgatactttgcggaaactatatcattagcgctgtcctttatatcaccaacatgcaatatccgcatatcaggcggcagattattattgagacgctccattatttcactgtcttttattccgtcctcaaaatcaatgtccacgaattcactgtcgcttgtgacacctattgacaaaggaagtgaaaacgttatcttttgatgagggttaaacccgtttgagtatttcacaggaagttccgccctcataattgaacgtgtaaagcatctcagcaaatccaaatgtgaaatatacttagccatgtttaacttcgaaaatttaagacgtcttttactcaaaacagacacctcctccaaagctggctgctccgcagccgctgcacttttcgcggcaggttggagttgtcttctcctcatacgccctcttatgttcctttatcaaaaaagatttaggcactcctatatcagcgtaatcccatggcagaatttcgtcatatcctatgcggcgcaaagcgtaaaactcagggtcaattccattaattttaaaagcttccatccacttgtcaaaatcaaaaaagtcactccagccgtcaaacttacagccaagtttctgcgcagttatcaaaacttctcccagccttctgtcgcctttagcaaagacggcttcaagaagactgatatcactgttatgccagttataaacaattttctttgaaccaatatgctcttttaaatattttgccttttcctccatttcggaaatcttattctgaggttcccattggaacggagtgaaaggcttcggaacaaaaaatgaggtgctaatcgtaacgcttacgcttctgccttttctctcctcaaccggtatggagaagaagccctcgtcaataacttttttgcccagctcggcaatccctaatacatcttcatatgtttcagtaggcagacccagcataaaatacagcttgattctgttatatccgcctctgaacgctatattggaggttcgtattaaatcactctccaaaacatttttattgataacatccctaagtctttgcgttcccgcctcaggagcaaaagtcaatccgctctttttaaccttttgaactttctccataagctccatagaaaaattgtcaacacggagggacggaagcgaaaggttgatacgcttgtccactgttatatccagcagcttatttgtaagctcgtccaaatcggtataatcgcttgtgctgagcgatgacattgacatttcttcatatccagtgttttttatgcactctccggcagtctcaaccagcttgtcaacacttctttcgcgcaccggtcggtatatataccctgcctgacaaaaacggcaccctcgtatacatccccggaacagctccagcattattctgtcatgcacggtctccataaaaggcacgataagtttttttggaacataagtgttatccatattgaggattatacgttttctaacctgtttcggtaccccttcacggttaggttcgaatcttgagatagtgttgtcatcattatattctacgtcataaaactttggcacatatactccgcccaaaggtattattgacataagaaaatcatcacggtctgtgcttccgctgtttttccattctttatacacatccataatctcgctgttaacttcctcaccctctccgaggataaaaaaatcaaccaaatccgaaagcggctccgcatgatacgcgcatggtcctccgcagcacacaaacgggtcaccggctgttctttctgccgtgcgcagcggcactcctgcgaggtcaagcatattcactatattagaatagctcatttcatattgaagcgtaaatcctataaaatcaaaatttttcaccggaacataactttccatcgaaagcatgggtattccctcttttctcatctcctgctccatatcatcccacggagcaaacacacgctcacaaacggtatcctcacgctcattcagcatatgataaagaatcttcattcccaaatgagacattccaacctcataaacatcaggaaaacaaaaagcaaaagtcagcatatcatccgaccatttcttatgcacgcttccaaattcgtttccgatatatctggccggtttctgcacgcgctttaaacaaccttcatatttgattttatactcgtcagtaaatctgctcataattccccctatttttttagcgagcctaaaagaccgcgaaccaaagaatttacagcggttcgtcccgcggaagtcaaaatacttttagccgccttttcaatctcattataacgcttttctctctgtttttcttctcttagttccgccttggcttcttttatagcttcagctttcattttagcctctgtctcttcctgctgcctgtttattttctcttcctgcgccttattttcagcaatttcactcttttccgctttagctgaaagtatttcataagccgattccctgtctattacagcattatattttgcccccatatcgctggaagctatcatctgagccataatattattatcaacaggtcccatcaaactttgaggaggcagaatgttagcccgctccaccatagaaggaacgcctttttcatcaagaaatgatattaaagcctcgccggttccgcactcggtaacggcctgttcagtatcaaactttggatttggtctaaacgtttgcgcagcagctttaaccgctttctgctcgcttggagaataggctcttagagcgtgctgtattctgtttccgagctgagataataccgtatcgggtatatctatcgggttctgtgttataaaaaatatcccaacgcccttagaacgtatcagccttaccacctgctctattttttccagcagttcttttggggcgtctttaaataaaagatgcgcctcgtcaaagaaaaacactattttaggcttgtccatatctccggcttccggtagaatctcatacaagtctgaaagcatccagagcatgaacgcagagtataaatcaggctgcaaaaacagcttttcgcaatttaatacattaatatatcctctgccgctgccgtcagttttaaaccaatccttaacgtccagtcccggttccccgaaaagggaatctcccccctcttcctcaagtttgattaaactgcgctgtatagcgccgatacttgctgtcgttatattaccataggtatttttaaaatctgacgcattgtctccaatatattgaaccatagactttaaatctttcaaatctaacaataaaagtttttggtcatcagcaatcttaaatataatatgcagaattccctcctgcacatcattaagccccaaaactctggacagcaaaagcggtcccatttcagaaacagtagtacgtatcggagtacctttgttcccgaacacatcccaataatatgtaggatatgactgatacttaaaacctgcgtcattcaatccaaactttgctattaacccctgcattctttcactgtcagctcccggctgactcataccggataagtctccttttatatctgcgagaaaaacaggcactccggcatcgctaaaagattcagccatcacctttaatgtaatcgttttccctgtaccggtagctccggcaatcaaaccgtgacgatttgccatctgcggaaacagaaaaatagggttttcatttttacccatccaaattttattttgataatacatagcttatgtatatgactaaactcgtatttaatcatactcccctttcttttatattttcattgattaacccaatgctgccgccgaaccgtaagtatggcggcagcaaattatattcataaaacattataaaaaattatgttttaattctttcgttttattataacatatctttttaaataataaaacctaaatatttatgtttcgacaaattttacatacctataacgcttttataactccgcaggctattttttcccctgagtttccactgggctgggaatggaagtcatcaggcttaagatgaataaccacagttctgccaataatttcggtcgcagtaaaacggttggttaaaaatgacatatacgcatacccatcattttcaaataaaggcggcaaatctcccgcatggtacggatgcggacactcccccggattatagtgtcccttagtgtttgaaaacggttcctgtccattgcttccgcagtcttcgccctcgtgtatatgaaagccgaaaacaccggaatcacatcctgtttctcccgtaggcagaccatatatatctgccgtgaccagcacgccgttcttctgctgtctgaatattacgcgccctcttatccccggatagttttcgccgcctgatatatcggcagcagaatttggtttataatttgctttgaacattttatattgcacctcctgttaaatgtatgccaaatacatcaaaaccagcacaataataattaatatagaaacaaaacaattctgacggatataatccgtcagaaccgtaaaattataataaaacttttatccgctaatattattaataaaattatataattaatgaagacatttcacttaaaacgagcagtttgtatatatatttacattattaatttatatgctttaaaaagcacagcctagagacaataatattgatatataaaacaaatcccggctaatgcatcagcattagccgggtaataacaaaatctgattttgcttatttcttaggttttatcttctgtgcacaatgctcagaactttatctatctttgagcgccaaaacgacttatcaacaatcaagctgaaaaatctcagcaccgggtcggcaaccagcgcaaacactgccaataacattatgcactgaacactcattgctgttataccaaacaatggtcttaagaaaattacacagcctatccagcctgctatcatagcgataatcaaaagccagtgccgccaattcataggttttgatatacgatacagtatcataaacccaacaacggatataagcactgtgcaggcggttgaaacgctttcctcatctatattaaacatactgcagaacacaactaaagcactgaccactaaaaagtcggttataccggccggagcagccttggtaaaaacattcgttaaaaaccgaccttttatcaagctcttgtttggttccagtgataagaaaaacgcaggtattccaatcgtaaacattgccaccagcgaaacctgcgatggttccatggggtaaccattcaccgcaatcattgaaaacaatgaaagcagcaatgaaaatatatttttaaccaaaaacaaactggctgttctctctatgttgtttacaacacgccttccctctccaacaactgacggcattttagaaaaatccgaatccaccaaaacaagctgagacacctgagaagccgcttcacttccggatgccattgctatactgcaattcgcctccttgagcgccaaaacgtcattgactccgtctcctgtcattccaaccgtttttccctgagctttgagcgctttcacaaactgtctcttctgctcgggaacaacacgtccaaatacgttatatttaagacaggcgtcatatatgtcctggtcagttgtaagactagtcgcatcaacatacttatccgcttccttaattccggcctcctccgcaactctggacactgtgaccggattatcaccggatataacttttacatcaactccttgttcagcgaaatactgaaaagtctcctttgcagttgaacgtatcggattcgaaagcagaacaaaacccaaaagctcaacattatccgttaaggctttgcctgtcatttctccaagatatttaacaaacgctaaaactctatagccttcctcagaatattcgtatacctcctcggcataattgtcaaattgctctctgagcacaaactcaggcgcacccaaaacatagttctgaccgcccaaaatacatccgctgtacttatactgagaagaaaacgaaaacactttttcaggttcagctttcgtagtctttgtaaaaaattccttcatggcttccatagtaatattatcgctgctcatagcggaaaccatattgcttaaaagcgcagtaatacaatctaagtcctttccctctgccggcaccaagcggctgactttcatagtattctcggttatagtccctgtcttgtccacacacaaaacgtcaactctcgccaaagtttcaatacacttcatatttcgaaccaaaactttttttctcgcaaggcgcataatgcttacaaccattgctacacttgccaaaagatataatccctcaggtatcatacctatcacggcggctaccattccggttatactgtcgctgaatgtcgcccccgcaaaaaacatctgctgaataaacaaagtcagacctatcggaataattataatgcctacaatcttaacaagcttatccaaagagcgaataagctcagattcttcctcacgcttatcttttgtcgcctttagcgtcaacttagaaacataagattcttttccgactttcagaagcctgcccctgcattcgccggaaaccacaaaactgcccgacagcagttcatctccggcttttttcgctatctcctcagattctccagtgataagagattcattaacctgaacgtttcccgagaccaccaccgcgtcagccggtatctgacaccctgccgaaaatatcactaaatcatcaagaacaagattttctacaggtatcgtttcctgcacaccgcctcttattacggtggctttcgggtcgcttattattttcaaactgtcaagcgcctttttagagcgaaattcctgggctattcctatcactgtattaaaaaatataacgcccaaaaacgtcatatccttgaaagagcctacaataagaagcaatagagccaaaataacaaatatcagattaaaataagtaaatacgttacttttaacaatctccccatatgttctggtagatgaatccacagattcattcaccgctcccttccccactctctcccttacctgctgaggactcagaccattttctgaatcatactcctcatctttccaggcaggatcaaatacatcggaattctccatactaacctccaaaaaatattttctgcaaccaataaatattataattattaatgtaattcatttctcaaaatcattaaaacgttacacccgtcctactaaaatttcaagcgtcttataaacctcctcaggttttatcggctttgataaatgcgcattcatccctgcattaattgagttctctatatcagtatcaaacgcgtttgccgtcatagcaattataggcactgtttttgcgtcgcttctgtttagactccgaattttttcagcagcttcaagcccatccatattcggcatccttatatccatcaaaacagcgtcataataacccggtttggattttttaaacatatctacagcaatcactccatcttctgcatgctcaacaaccattccgcgtttttccaaaagcttaacggttatctctgtatttatcggatgatcctccgcaagcaaaactcttctgccgcttaaatcacaagtattctttgaatctctctttaaatcaataaattctcttatttcttccgctcccggctctgaaaccggtatctccacagtaaaagtgcttccttgatttataacgcttgcaacttctatggttccgcccattaagctgaccaaatttttcgatatcgccagtcctaatccggtaccttcctgagacgaagaaaatttattttgttcctgttcaaacggattaaaaacacggctcaaaaagtctttgctcatacccacgccgtaatcacggataataaacttattatattccttaccgcctctattcaaagataacgcggtaaattctatcctgtcgccgttatcagaaaattttatagcgttgtttaagagatttattaatatttgctgtgtacgcataacatcaatttttgcatattttcttttaaattctgacctgtcaaacacaaagtcaatattctttgcttggtataatggttttataatagacataatagtggaaaaaaacttatccagctctgctatttcgggattcagcttaactttttgacgttcaatcctagacatatctaaaatatcattaatcagtcccaatagatatttcccggaatcatttatcttcttaaaatactcagtcatttcaggatctttagaatcctcagcgcctaaacttgccaaacttaaaacagcattcatcggagttcttatctcatggctcatccttgataaaaagtcgctcttggcagcattagcttgctttgcctgtctaagtgcgtcttgaagcagccggtttttttcctgttcctgattaaaaacatcagttatatcgctgcgtacaaaaactattatatcacgccgctcattcagataataaatcctatgtttcacacgtctcttttcattaggattcctcttattgtaaactgaatgaattatagaaaactcatctttgtttataagctctttttttatgttttcaacgtcgaaggctttaaaacattcctcctgttcctccggcggaatcatagcgggtatatttaccatattgctttccgtataatctcgtggttcagttcccggaagagctacggcgtcttttttataattcagcattttaacaatattagttttcaaatttaagtatgaaataaagtctacttcttcctcaattgcactctcaataacttccttttttaatatatcatcggttacatcatgagtataaacaaaagcataaatctccttagacctggggtcttcagccatactgatatccgctgaataatatttaattctatctttcccatccggcggcgtaatgcaataaacaacctcatattttctgcaatcattataataattattgagcatagtcgtttgattaaactcttttttgcatatttctatgtccttatctgacgccataaattcatacatacctgacactgcgtcgcttaatctgcaattctgcttaattatattgcggtgaccgttattggtaaccgcctcagctatagtatccttagaaacattatatgtaatactggatacagaatcagcctcaagggcgctctttcttgcaagctcctcttcgaaccttttttcagcttctttttgcttggtaatatctatagctgtgacaataacttttgtccgctcttctcctttgcccgggattgatgtaaaattcagcctctcccagcggtaaccgtctttaaatttattctttatctcacaggatccttcggtttttccagccttagcttcattataaaaacgttttaaatcctcaacgctctcgggcgcggtaatgttcatttcaatccacgagtcaggataattttccataagattctccgcgtcaaaatcattttcaaacggagaagtccaaacaacgcagcctgtctccgggaaatactcccataattttatttctgaatgtcttattgcctcattcagcatcttttcactgagttcaagattcttatatgcttcattaagcttaatactggctttctttgattcatcaacatctgaaaaagaaacgtaaaagacttttttatccccgtctttttcagacaaggttccgcgcatattaatccattttaaaacgcccggttcgcttgtctcaacacgaaccgtacattctcctatctgtccgcattcatttaaagaagctatttcacttaaaattttctttttgtcatcaggataaatatagtttagactatgatttttctcaacactcatagaatcttccatattccgtcccagcattttataatagccttcattgagaaaagataccctgaacttgccgtcttccatctcgcatattccggcgccgcccggaaaattattaatcaggtcattacgctttttataagcaaaaaaactttctgtatcctcgcttatgtattcaatatacgcaggaataccgttccaatctatgagtctggcactgttgcagtaatgccttgtcatatccctgttaaacaattcgcataccagcagagagttataactcaaattttctttccggcagaactcacagcgttctctgcggccaaagaaaacctcatagcaatttctgcctaaaatctcaccgctgtcacacagtcctaatctatacatggcgctgttggcatagagtatttcatcattacttaccgatgctacaaaaacgccggtcggagaatcatcgattattttccgatacattttagcttcatcagaaccctccgaaaaaagtgcggcaaataccggataaccgttctcctcacgtattctaaacgcattgaggtgtatccaagtatgaacattatttttcgtatttaatcgaaaatttatattcatattaggatatttattatttaacactctttcatacattctcataaaccggggcaaatcccccttatatacacacttttcaattaagtctccgtctgatacccaattgtcatattcatctttggtcatatccaaaagctttggcactccgtcgctgtaatacaaagtttctattccgtcaggcataatcttatacacaacagtatttacaagaccgtttaaaatcttttcattttccatattcttattaattatttttttcgttttaagaagtttgtttactagaaacactaaacatattaacaagattaaaatgatgcagcacatcaccgttattaacatcaggttttggctgtacaaattctgccgccctgcgccgttaatcattgcataacaaaacgaaccgttaagcggaaacaaaaataaaacactaaacataagtgcttttagaataactttttttatggaacaaattgactttttcatttgccgttctccaaaattgccgacaggatatgctttaaaatataaccatcagcctttattttctatcaagcattatacattatccaaacctgaaaatcaaggaatttaataaatgtttccagttccttaataattaaatccaaacactatttatttcttatttaggtttggaattattttatttttaatttatatctgaattttatctatattatattttcctcttgtcttgatttcctgaatatgctataatcttttttacatgtagtttaacgaccggttacagtaacgttacaaaaaataatattaccatattttttcataccgaaattttattaattgacaatattttagtagtttcaattaaaattgtgttacaaagagccaatagtttttatagaagtgccgttatataacgctttattgatgttacaaaaaagtcatgaaataagacaaaaaaagccattgtatttttttacaacatatgttattatactatatgttgtgttagtgaatttacatttaacgcaaaatgttgtgattcgagaaaaattcccgaaatttcagttttaagtaataaagcattagagatttaaatatattgccaaatacatatatttaaacaacaattttacgttacagtttttccgcacaaaaaggtttaccggacttaaatccgcacaatagtataatttaggagtgttttgtatgattaaaattattaagaaagacggaacagaagaagattacaacgtaaagaaagtagttgtcgcagtaaaaaaatcagctaaccgcgccttagttgagtttactgatgaagacatacacaaaatttgtgccttcgtagacagcagggttcttaatatgcaaaaggataaaatccatatcgccgaaatgcacaacatagttgagggcgcgcttgatatggtcaatcctgtggtagccaaaagttacagagactacagaaactacaaacaggattttgttcatatgctggacgaagtctatcaaaagagtcaggcaattatgtacataggagacaaagaaaattcaaactcggattcagctttagtttccactaaacgatcactcatttttaaccagctcaacaaagaactttatcaaaagttctttatgactgttgaggaactccaggcctgccgcgacggctatatttacgtacacgatatgtccgcaaggcgagacactatgaactgttgcctgtttgatgttaaaactgttttaagcggcggttttgaaatgggcaacctttggtataacgaacccaaaactttagcggttgcttttgatgttataggcgacattgtattgtcagcagcaagtcagcaatacggaggttttacagttcctgaagtagacaaacttttggctccgtatgctgaaaaaacatatgcccaaaataaagcccgctatttagaaatgggtttgtctgaggaaacagctgaacgtgaaactataaaagatgtgcagagagactatgaacagggctttcagggctgggaatataagtttaacactgttgcctccagccgcggcgattatccgtttataacggttaccgcaggtctcggaacaaaacgctttgaaaaaatggcaaccatctcactcttaaaagttcacaagaacggtcagggtaaaaaggaatgcaagaaacctgtattattccctaaaatcgtatttctttatgatgagaatcttcacggaccgggcaaagagcttgaagacgtgttcaaggccggagttgaatgctccgctaaaactatgtatcctgattggctgtctcttacaggcgacggatatgttgccggtatatacaagaaatataacaaagtcgtatctcctatgggatgccgtgcattcttgtcaccgtggtacgaaaaaggcggtatgaatcccgctgacgataatgataaaccggtatatgtaggaagatttaacgtaggcgcagtaagcttaaaccttccaatgatatacgctaaggccgaaaaagaaaacaaagatttctatgaggtccttgactattatttggagcttataagaaagttacatatacgcacttatgaatatctaggagaaatgcgggcttccaccaatcctctcgcttattgtgaaggcggattttacggaggacatttgggtattcacgacaagataaagccgctgttaaagacggctaccgcctcttttggaataactgctctaaatgaactgcagcagcttcacaataaaaaatctttggttgaagacggacagtttgctatagaagtcatggaacacattaataaaaaggtagctcagtttaaagaagaagacggaaacctttatgcactttacggaacgcccgctgaaaacttgtgcggtctgcaggtaaaacaattcaggaaaaagtatggcataatagaaaacgtttccgaccgggaatatgtcagcaacagttttcactgtcatgtttcagaagatatttctcctatcagaaaacaagatttggaaaaaagattttgggaccttatgaacggcggaaaaattcaatatgtaaaatatcctattgactataataaaaaagcaatagagacattgattcaccgggctatggatatgggcttttatgaaggagttaatctctcgttggcatactgcgacgactgcggtcacagcgagcttgaaatggacgtatgtcctaagtgcggaagcaaaaacctcactaaaatcgaccgtatgaacggatatttgtcatattcgcgcgttaagggagacacccggcttaacgatgcgaaaatggctgaaattaaagacaggagaagtatgtaagatatgcgatatcataatataaccaaagacgacatgctgaatggagacggtctgagagtggtgttatgggtagcaggctgtgagcacaaatgcgaaggctgtcataacccaataacctgggatcctgacggaggactgcctttcggagaagatgaaaagtcagaaatttttacagaacttgacaaaccacatatatccggtataacatttacaggcggtgatccattatatcaatctaatataaatggggttgaaacgctggcaaaagaaataaaagaaaaatatccggacaaaactatttggctctacaccggatacaattgggaagacataaaagacttgacggttataagatacatagatatacttattgacggaaaatttgtgaaagacaaactggatccaaaactacattggcgcggaagcaccaaccaaagagttatagatgttaaacaaagccgcgatgatatagttttgtatacaaaagcataaaatcaacataaaggagacgattatgacaggtatagcaaaatttgaaaaagtcagtatagaacagtttaccgaaggatggaataactgcttcggcagtactgatatagataaaattaaaaaaacttatgaaagtataaaactcccaaaacgcgcaacagcaggaagtgccggttatgatttttattcgactttggattttgaactaaagccaaatgaaacaataatgatacctaccggaataagaacaaaaatagacaacagctgggtcttatgcctttaccccagaagcgggcttggttttaaatttagacttcagctaaataatactgtcggaataattgacagcgactactataattctgataacgagggtcatatctttataaaaataacaaacgacacaaatacaggaaaaactgtttcgctaaaccagggggacgctttcgcacagggtatatttgttcaatacggcatcaccgttgacgatgatgcgacaggtgtaagaaacggcggctttggaagcaccggaaaataaaattcaggagacaaacaaaaacaagttattatgaaatccaatacaaaagaatttatagaaaacagatactctcaaggtgtgagagatggaataccgataggtttaggatacctgtcggtatcctttacgttcgggataatggcggcaatgggaggacttcctgtgtgggcggcgcttcttatttcaatgacaaatcttacctctgcaggacaatttgccgggctttcccttatgcttggcggagcttcttatctcgaagttgcaatgacgcaggttgtaatcaatatgagatacgctcttatgtcagtctcggtatctcaaaagctattcggcggcatcggaggattaaaccgtatgggaatagcttttggcataactgatgaaatttttgcagtatccacaactaagccggctcaattgggacccaaatatatgtacggacttatgacaataccatatataggctgggctctaggaacacttgttggagcagccgccggtatgcttctgcctgaatcaatcagaagcgcgcttggtatcgccatatacggaatgtttatagccattgttgttcctccggcaaaagataataaggctgttttatatgtattattaggagctgtgcttctcagctcgtgctttaagtggtttcctgttcttaatatggtatctaatggttttgtaataataatctgtgcacttgtatgtgccggtctgggcgcttatttcgccccaattgatacagatgaaactaatgggaaggatggcatcgatggacaaccttaaaattttaatatatatagctgttatggccgttcctacttacttaatacgaatgataccattaacaataataagaaaaaagattaaaaaccgttttctgttatcctttcttttttatatgccatatgcagttttaggcgccatgatattcccggctatactctattcaacctctagcatatattctgctgttataggctttgcagcagcaatagcgctatcatatatgcaaaagagcctaataactgttgccttattatcaagcctggcagtgtttataaccgaagctgtaattatgtagaaaaaaagtcatataaaaattaaaaaatttttaaaaaaagtgttgacaaacctttctagtatatggtatacttatcaagtcgcgacgtgataggtttgtcctaaaagtcgtataatacggagaggtgtccgagcggtttaaggagctagtcttgaaaactagtgatgcgaaagcacccagagttcgaatctctgcctctccgccattcctttttataaaggcgctatggcacaggataaacttctgtgtcgtttttttcaaatttaatacagagcggtttagctaaaactaactgcagcgaattcggagatgtactcaagttggctgaagaggtgcccctgctaagggtataggtcgttaacgcggcgcgagagttcaaatctctccatctccgccaaaaaaaccattgcttaaagcaatggttttttattatttaatccaatatgattctcatccataaaactaataaattatttaataaactttataaaaaaagcttctgtcaaatttaattataaataatcattttactaattctaattttatacaactttacaatctataataatataaatattagtatgataaaggcattgatattggtattatctcatcagtatttttccataaaaatgctttcagtgatatatttggttcttcactatttatataatccataaaatcataagttcctgttccgttaatctctttcatatcagtctttaacaaaatgtcagaaccattgtataaagctaagataagttttgcctctccttcaccctctactgatacctcaacattatttgcatttctattaatactaactattgaatacttaaaatcatcaacttccggataaaccaattgctcaaacgataaagtaacatcttttatcgtatatacttcttgtgttcccaaattattatacgcaataaggttaagctttgatctatctgcgtcagccggaaaacctgtaaaaataaagtcactagaaccaacagacgattttgttccttgtgtaattgtttgattctcataatcaattagaagcgagatttgatattctatagttccatcttgaaactttccgccaatatttaatttttggtgcccttctatatccttagaaccgctgcagttagccaaagttccatcaatcatatcaagctgattccatcttttgtatattctcaaacgtgtatatctcgaactgtccgaacttgcctgatactcaacaggaatatctcctcccagtatatctataaatgcagtattactaatgttttccggagatactacaaccgtgtaatttaatcttatcgtctttgaatttttaaaatcctgacgttctttatcagtcattttttcaagaaaatcaattactgtaatattatcagttggactaatgctttcacacgctttaatatttgtatacaccatttgtgcagctaatacatttaaactcgtttcattatccggaataatactaacttcttgtgacgactcctttactctcataacatcactcgtaggcgtaaattttactatataatctccgttcgggataccacttatagattcactgtatatattaacatttgaaggaacagatacagaagaactctttactaaagcgccctttttatagaactttataacaaaagtttcggcatctttatatttattgtcaagataaaaattacacttaacacttccggaaccatcggtattaatataaggactgatattaaattttacagttgatgttaaactatatccggtaatttcattataggctgttacctttacacttgactcaacacttgcttctccatacgccggcctaataacagtaatggctcctccatcattcacatatgaatatttgtcgttggtatttgtcttccattcaaacttatacccatccacagttggcagtggaattgtatcagattttccatcatcttcaaactttaaagattttattgtctcctcaatctcctggtaatatggttcagcgtctacaacctctatatctattttctttttaagaccgcttgcagattgaaccgtcacctgtgctttacctattttaacacctaccatttttccaaatttatttactgtaacaatagaatcatcatctgaaacatatattaaatcatcatcagattctgatggtaatatttgggcatttatatattccgctctattttcacctatttcatacttgtctttagcagtcaatatttcatttgcaggaacatcagaaattgacggctttacagtaacagcaaatgttttttcacagcttccgctctgagaaaaaaccgtaattgtcgcagaccctacagctcttgcacgcataattcctctatgtacagtaactatactatcatctgatgacttccataacaatacatcatttgtttctgcaggctcagtattaaaatttagatttttaacctcaccgtattccagtgttaaactatcaggcagtccgcttatatcagttattttattaatttgaggattttcaattatatctgtcagatttacatcatttaaattcaactcggaaggctcaatataatgtcccctcatcatactatcggtaatattcttccatatcggtttattattgactctgtcccatatagaaaagtctcctcctgttccattgtcccacacacaaggaacagcaccacaaactttgcttcctttcgttactatttcatcatagtatcctcgctgtatatcatttgcccccgaaggattaccttgaaactcgtgatatctatttccatattcagctaatataatcggataatcagaaaactttttacatatttttttcaaaacattaataacttcataagcttcatcatatttccaagatacagcagtattgtttttataaatatgggttgtaaacatcaatctattatcaatattatatgtatcctcaggcataatgaaattatcctcagttcccccatttgcataatgggatgcaaccgacaaatagcgataaagattgtttgatccggttgagcgaaccacatttacaaagatttgatttaagttaacaattataggtatatcataggctttagcctgactggaatttttcatatccccttccatacatgtcagttcatttattgactcaaagattaaatgctcatcatagtttttaaaatatgaagcaatacttctccacgttccttcaaatttttcatatacactatctatgtcgtctgccgcaacgcgaagccatccgtattgttcagcgccgtcatgatgtatatttattattgcatacatatccaaatcaatacagtagtcaactatatcctgaactcttgaaatccaatccgggtttatagaatacccatcttcatcatcaatcattgttccccacgtaatcggaatacgaattgtattaaaaccagcatcatgaatagatttaatcatttctttagtagtcacattgggttgccagcctgtttcgcacggaatcatatatccgtcgctccaatcgttgctcgttccatccatagtgtttccaagattccagcctactcccatttcattcacaacttcattcttatctaataaacgaaaacttaatggatcttcaggctcatcagactgcacaaattttaatcttgatttctctttttccagacttcctcttgctgtagtcatgtccacttcagaagctccggaattattatatatcttccatgcgttttctaacgcttcattaaacacatcccatgtttcatttatatatttactttgatccatactgctgcagtaatctaaagatagtttcaacaattctcttgctgaaagcttactgggatattctgcgcaaacaggtgtaaccgctaatgccatcaccatacacattactgctaaaacacaaaacaatcttcttatcatcttaaattctcctttcaatttaaaaattaatttttagatgatttcaaccggtttatctaaagtcaatataacatatccgtattttattaacaagacaaaaaaggagcagtttcagacaaagattgtcaactttttatttaaccatttgtattcaatttttgtcttattcatctctgtttttgtcttgttttaatctttcttgtgtgttaaaattaaaataaagaatatttaaaggcggtgttataatgtcaaacgagccatattatgaactcaatacaaaagatattcgtattattcataacaaacgcgaagttaaatttctgcctcatatccataattcagttgaaataatatacttattcagcggtatacaacatttaattataaacgaacagacatatattctaaataccggagaagctgtactcatacctcctggatatgtgcacagctgctttcgaatagattctgaggaaaacaacaaatataataaaaacgccgaatttgttagtatcatttttaaatcacagcgtatacaagaatttaaagagtttttcgataactacacctttaatcaatacaaaatatataaaaatcaaatagatgatttcatgtcacaaattttcaaatacatgatagaagatttttctgaaattcgtcagtttttctactgtacaatagcagtaaaaaaactcattaatcaacttgagccaatcccaattaataataataatataaaaatcagcaatgaatataaaataatatcatatatcgaggaacactaccgtgaaaatataactcttgacacactatcaaaagaattatatattaataaattcactgtttctaaaattttttctgagcaaatcggagttaatttcagaacttacctaggcataataagaagcaatattgctgcaaaattaatccgaagtaccaacgactcactcgaaaacatcagtaccatgtctggttttagcagtgtacgcacctttgaccgaacattttataataatttcagaataactcccagagaataccgtaaaaaactgattataaaataatataaaatattgtatttataatatggggtgtaaaatatgaattcagattttaaacttataaacggtcttaacatttataaattaaataactctataaatactaaaggacatattcatgaacagcttgaaatttgtcaagtcattgagggtagtcaaaaaattaaaattaaagacaatgaatatattcttaatacaggtgatacagctataatatttccggaataccttcatagttattctacatgcgataacataaaatcaaaaattttaattttaaaatatgaacccgagatatataaacaagtttgtccaaatatacatatactgaaacaaaaaaactataaaatttcccaaaatacagcaggtgataaatcaaagatgatatttgaccaaatcttagcacagacagataatattatattattaagctgcagtatgatattgttatccgacttaatagaaagtatagatttggttcaaacaaataaactgggttctcttaatctaacgtgcaaaatattaaaatatatagaaacaagttttaataacgacattactctcaaagatatatctcataaatttggtgtaaatcctcatataataacaaatatattttctgataaactaaacactagctttaacatttatattggtatgcttagatctgaacatgctgcaaagttaattcgctcaacacaactgcctcttactgttatcggtgaattgtcgggtttcggaagctcccgcacatttaacagagtattcaagaaaaatttcaatataacaccaaaagaatatcgtactctacataaaaaaacgtcagccatgtaaacagccttaatttgtacagtccgtacagattagggctgttttgccgctattttattttcctctgcaataaaattaatcaaaaatcagaattaaataatatcttgcttttatatttaatacgtgttataataaacgttaacaaaatatggtgcagctattacatatacataaaattgttatttaggcacaaaaatttaaaattgttttagaaacttgtatatatataaattatataacaagttggtttgtgttgtatttttttaattaataaaatattaccatatgtacaatcaaaataaaaagggagatattttgaacacttgtatatataatttttaaatgtccaaatttaatgttttttctattaaaaattatgatcgaaaaataacctgccttaaatcatctaatagcgaaaatattctcggggggacaaaggagtatatgttaatgagtaagcaaaaaagaaaaaacaaactcaaaaaagtagtaatgtttataatttgtgcattttctatatttctatccacattcagcattttttctacttatcagcttcatcaaacagcttcaatgatttataaccacccttacactgtctcaaatgagtctcgtgcaatgcggtcacgtttgctggacatgaaaagttttctgttaaatattgtcgcggaaccttcatgggagatagataatgttcagcaattattaaacggccgttataatatgcaatataatgcaattgaaattattaccaaccaatatcttggaccgagtgaagacaccatccaactgcttaatgcaatgaatgacctaaaaaacactcaaaatgattcactgcctcttattttaccaatgactaaagaagaaacagctttatatgtagagcaaaatatatatcctaaatatgacgctgtagacgcagcgctgacaaaaatcattgcgtttgcggatcaaaaaattaaaggtttagaaaaacattccgctaatacagcaaccacagctatcctttcttctttattactcactatcttcctgccggcttactttttatttgctttttggcgtgaaagaaaaaacattcgcgagattcaataccgcgaacacttgtttgatattctttcttccaacgtagatgaagtttttttaatctataacaaagagcatgcagaattagagtatgtcagcaataactgtcagcgtgttctcggcataaaagaacgctctatatttaaagaaacagattctttgttgaatctgattatcaatgaagataaaactgattttatggagtttattaagccaactggaacaacgtcaagcaaaagcgttgaattcagaatgaagaacccatccggacaagtacgctggtttttggcgcaaagcttccctcaaatcagtcaagacaaaatagttcgctatattgtttctctttctgatcgaactgaaaaaattattaaagaacaggctttaaaagacgccctgataaacgctcagaatgccaacgctgcaaagcaaaactttctttctagaatgagccatgaaattcggacaccaatgaatgcgataattggaatgactactatcgcgggcgcctacatagaagacaggaagcgcgtagaagactgtttggaaaaaatcggatactcatctaagcatctcatgacacttattaacgacgttcttgatatgtcaaaaattgatgaaggaaaaatgactatcgcccacgagatttttaacctggaaagcgtggctgaatcaatcacatcaatcatatatccgcaggctgcagaaaagggtataacattttcaatgcctttgatagacctaaccgatacaatattaattggagactcgcttagactaaaccaaattctgattaatttgctatccaatgcaataaaatttacgccgcctggcggctcaatccgcatggaaatacggcagatacaaaagaaaaacggacgtatacgtctgcgttttacagtaagtgacaccggtataggcatgagtgaagaatttgtaaaacgtatattccttccttttgagcaggaaaacacttccgcaagcaatcaatttggaggcacaggtctcggaatgtctatctgcaaaaatttagttacgcttatggacgggactatctcggttaacagcgaattagagaaaggcagcacttttaaagtcgaattagactttgatactgcagaatctaaagaagaaaagtcttcatacaatcatcgagtactggaagcattaaaagttcttgtcgctgatgatgatcgtgattgttgtatccatactacattgcttcttgagaatcttggaatcaaatcgaagtgggtaatgaccggagcagaatgtgttgatgaggttctgtcagcacacaaggttggagaagaatacgacgtatgtcttatagactggaaaatgccggacatggatggtattgaagtgacacgccgtgttcgtgaatttgtaggtcctaatacaacgataattattattactgcttatgattgaagttctattgaacaaaaggctcgagaagccggagccaacgcattcctttcaaaacctatatttgcttccacactttataatacgctgctgactgtaacgggaattgaaagagcaataaaaaacaataaagataatcagccaaatcccgttttaaatggtctcaatgtattgctggcagaagataatgagcttaaccgtgaaattgctgttgaacttttgaaaatgacaggtatgaaaattgactgtgtaagcgacggaaaagaagctgtagaacgcttcacaacaaacggtgacgattatgacataattcttatggacgtgcaaatgccttatatgaatggatatcaagcaacagaagctattcgaaaatccggacatcccaaagctaaaacaattcctattattgcaatgacagcagacgcatttcatgaagatatggtaaaagcaggcgaagctggaatgaatgggcatttagctaaaccaatagactctgaacagctttataaaatgatagaatcttctgtctcggcaaagagttagttacatataaatcattgtttaaataattaaataaaaaacgttacgatctaaattttcgtaacgtttttatttattatttaaacaagtgaaatattttattcttataagtaacagctctatttctgttaatgaaatacataaatatatcaacatatagcagtcttctttaaactgctatattcatccgtcttactgacttatatcatttttatcaacttaatatgaaaaattgttttacggattttaatataaacatttaaataatttaaacaatactagatttaccatagcttaacaacacaaaaaaattgatttaactaatttataaataaaccaattaaatattttactttaaagaattattaaatatctgtataatacagttttatatttaatatacagcttgttcttcttgcctacaatttatcaatttgttaagatgtaatttgaatatacttattttgtcaaaattatagtattactgctttcttcatattctactttatatcctattgcttcacagaattctcttactgacacatatgtattatctatatcatttccaaaatatttttcatatctttcaatatcatatttttctactattttgctaaattcggtcttgctcatgtcataaagaaaacaattttttagaccaaaataacttattataattttgtcattttctaaataataaggaaatacaggttcgctatacttatttccatttatacataagtataagtctttttttctcgcttcgaatcccccattattaattatatattctttataagtttttccgatgttttctttatcgcacttagcttcaacaggataggattcactatcaataaagtgtaaattcatttcacaattcagtaaatttgatataatatttttatatacatctacattaataggagagtaaaaagtgtatttatcacttaaattaattccatctattaatccatattccattgatttttgccataactcttgttctgtaaatatgtatttccagtaattacattcacatttgttttcagatttttctaaacaacgaatacacaaagtcaaaacttcgccaatagtagccttatcatatggtcttaaataatatcctcttccttttatatctgtctctagttgtatcattcctattctcaacgcatattctatatagtcataatcataaatatgcagccctctttctttgtaatctaaaaagttattctctattcccattattattccatttttatcaatttttttctcattcaaacctataattttcattatgttaacaatgcaatcttctcttgtaaaactatcattttcataattttcatacaatattaattgttctgttagttcatcagtatttatttcttttctctcttctgcatatgtttttattgagtaaccttgaaacattatgcctgttattaaaataaaaactattattttacttatatttttattcattttataactccttttttaagtgtagcatgatatactcttgcacctaccattgttattttctcaaaatattttcacttatttgattcggatcaggcaaaataagttatcttaacaatattttatcttctataatttgtctaatttacttacgcataaaaaattgaacggagctatatgtatttcttaaccatttaaaaagaagtatttaatggatttttatttcaaatagttaattaattttatatattcaaaaactttccggtgtttttactccatttcagttatttatgcgtatgcttgtccaacttttttggtttaccggagggcgtaaccaatacaccctccgcaacaattttagtttgaataaatgtctactctctgcaattcttcgtcccattccacctgacagccaaatgcttccgatattgctcttaatggtactaatgttctgctgtctcctactaatcttgcaggtacatccaactctatttcttctccattttttagcatcctattactgtcaattgtcactgacactgttattccctcctttgttgctgttgccgtttgggtttcattttcccactctacttctgctcccagcgcttcaaatattgctctcattggtactaatgttctgtctttttctgttataggatatatatcaaaatttaactgcttattgtttatatatactgtaatttgattatttttcaaaggttcctttatcttttgtaaatcaactagatcaacttttttctgtattttttcatcaatgacaaaatataacttatcagcactcatattatacatccatgaattcgtattttcagtcaaactaatcggtaagaatgtaaatatatctttataaccataagtaatgatatcatcaaaattttcatcaaaatataattcacctaacaatttcaaattcatgtcataaatgtcattataatatgttattatatatttatttccaaaactaaaagctccgtttatattaaacggaatatctgttccgtttgtattttcaacaaccttaccgtcctccgttaatagataatttatgcaatttagatttgaatcttttgcacatattattgcactcctattatataaacacacccctgatgtataataagtatatttttgatctatagtttttgtacaaattatttccccactaatatcaaacaaagtataggtatttgttgttggattatatcccaaaatagcattattgtttctattaattacacgacggtctgaattagactttcgtataaaaatataataaccactcatttcactaatataatttatatttaaatctagatcaatgcttgcataattccttgtaccatcattatccacccaactcattaatgcgtatccattatcaaattgataaattgtattctgggaactatatttaatttgaccatttacatctattatgtaatacatattatttctttgtgctatcccatatccattattaaaagattccatataatcatatatcggcggcactatccattcataatttttatttatataaccgaatttattttcaatctctataaccgctatatcgtctttgaataatattggatttttgtatatatttcctttataatcaataaaaacattatagttcttattatcttcttttctaatagccaacataactccatattcgtccatatttataatctcaatatctagaatatccgactcctttaattcatccggcaatataaacatttgattattactatcatctattttatatttattataattttcttttgccattacatttatgtaaccaataaataaaaaacaaacacatattaaaataacaatttttcttaaatacttcatagtttttctccatttctataaataaactaatttttaaggtttacttatctacttatatttctccaattaggataatacttttccaatataaatggatgcgttgtataatgaaatggccgaccatttaaaaaatttattgaatatattacatattctaaatccatttgttgtgcttgtgttggcgtttggaaagcttcgttcataattgattttactttactaggcaattgtacatattcaggaattcctttctttctatagtgatcccctatattaaaaaccctatgtcctatttcatgagctatagctttttctattgcgtcaacatacgttggcgtttccgcatacaaaggtattgtgtccgttaacatcaattcattgccgttttctgaacaatatatacaaacagaacttccttgattatcagattgatcaattagtccctttcttatttctattttaactacttgatatatattgggatctgaaaaaactaaattagtagtcatattatatccattcacatttccactccaatacttatttacaccggattttaatatactatctacactactccgtcataagttttattagacatttcgccaaataagtaagcatttatggttatattataatttttcccgattggacaatagtaatagcatcaagtttcttttcttcctttatggttccaccattgagtacaacattttttaacatatcctcataggacaaaactccatcttgataagcatgaattgcgctattaatatttattctttcggacttgttgtgttttgggttaagcttcgtcaaagaggctatactcgttctattacaggtctttaccgcatactccgcaaacagggacaaatgcctgttaaaccacccaatcccaaatacttttactccgtttcaattttttatgcgtactcttgtccaacttttttgttttaccggagggcgtaaatgatttacgccctcaaaatttacttactgaacattattttttaaagttatcttaatttattgttttattaggaacctttattctctatagccttttttccaatcatctatgtaatattgattaatatatcctccatatatgacgtaaacggaaacaggaaaaattatacacaaaaagcaggaacaaatacaatactgacagggtcatatacatatgacatattggacagactgacagaagtagattacggaacagtaagcgcgggatatatgtataatgcgaatggaagactgacaaaggagacaagggggaatataacaagcgagtatacatataacaaagccggattggtgacagagatgaaaaacagttcaggtcagagttatacatacagctataacttggcaggaaatcaaactgtaaaagaatcgggacaggagataacaaattatggatatgatggaataggacagctgataactgaaaatgtagtttcgcccaaagaagatgaatgggattataataatacatattatcagtatgatgtgatattatggtgatataactataacacaatttatgagttttccgtattctttttttctatttgtaacacatctattgtaatcctacacttataaaatataaataaattaaaaaaacacttgacaatatgatttaacagtgatataatttaaaagctgtgtaagtagtcacgccggagtggcggaactggcagacgcccgggacttaaaatcccgtgggaagtaattcccgtaccggttcgattccggtctccggcaccacacagtaacaatatatcgcggggtggagcagtctggtagctcgtcgggctcataacccgaaggtcgttggttcaaatccggcccccgcaaccactaagaacacgcttaccaataaaggtaggcgtttttttataatttaccaaattaatttgaatatatctttttccataaaattaaaataagcttcacatgtatttataatataaatgttgttattatataatcaataaaaaaggaatataaaatttatgaattttgatagatttaaaacagatgagaaaagagtaaaatatttatatgatcaggtgaataatattacacctcttaacgaatgtcgcctatataaagaagagcaacttcaaaaaactgatgatgtgctgttattgcgtaattgtattgaatggatcattagagctaataccataattttaaacataaagtatgcgttgtctcaaagccttgccaatgtcaaaaagatgaaatgttctttagaagaaacagataatcgtgtgaaatattcttattatttagaagatgctgtatatcgtgacattgctttatgggacatctataaacagttattaaatgaattttatcaatgtggatattcgaaagatgatatatataacatttttatatttttaaaacacaaaaaatttgagggacgcaccccaaacaatatattgaaatatttagaaacagaaaatcatcaaatagtgcgacaaacattaagaaactcatttgcacattcgaccgactctacatccacatatatttttcattcaaagtctaacggaacagttaaaccagaacttaaatactttttacttaatcatccttttgagaatttaaatataattatcgaagatatacataagttactaggttttatgaacaataccattaaaataattaataattttcgagaagctaaaattttgctttataatgtatctacgactatgccttgtggagaaatactcgaagataaagacttatggaatttatatatattgcaagataattttgaaaaaataattataccttgtgaacattattgcaaaaaggcacacaaatataataatacttatgtatgtaaacctattagtatttactatcgtagaattaatgaatcagaacataaatatgacggtaccttcattccaaaactatcttttgatgatattgtaaaagattaaaaatattaaaaacctatagaattaattctataggtttttaatattataacaaatatatttttaattactgtattatttgaaacaataatttgttgtattccacacataattatatattttttatttttataaaataatccttatgatctaatatattaatttatattaacaaaagtcacaccagatattattccatgaaattaaggatattctctgagcatatatctgcggcggcatactgtttgtcataataccgtcaaattcaatacgaacaaaatttccaggtctaaaccggcgtgctctgcgcgttatcacaacaactctctgacggttttctatgtctaatacaaacaaacggtcgttttgtacgcctattactatagcccgcataatcaattttaacacctcctttgcccataatataattatgctgcttgaaggcttattgaaccatgtccttaaatatattagataaatatgattttttatatataaaacaaacttaatatttttattctctgttattagattctatttataattatttatataaaaataaagatatttatttatgaaacaagactcaaaagactataaaaatataaaacctaaataaatgtatttaaagcatggctttttgaaggggctaaatttttaagaaaatatgaattgccaaaaatagagacatgtgataaaataccatcaaaattaatttctttcgataaaacaaaaaacaataaattttatagtaaatggggtacatttttatttacatgattataaatatgaatgtttatggaataatccaaaagtatatttaaatcatcttcaataaaaagaaaaattatatatgaaaaataaacaatatattgaattattatttgtatttaatcattattttaaacatattatcgaatggagtaatggacttaaagtcaaatgcagatcttttacaggtatatttgagactgatactgagcctgaagatgataattacattggtgagtatgctgccgccgttcacgaagttaagatattgcataaaggaaacgataactctgttaaaatatataataactgtatagaaataacattaaaaaatattcctgaaaaaatttctaatgaaaatggcacaattatttggaatagaccttccgaactaaagtctctttaatagattaagcaaataatttgctgattactattgattgagttttaaaaaaccgcaccaaatttatttaattataaaattatttattttttaatggtatgcttagcataaaagtatatccactgttaattccttgttttatattaacattaccatctaatttttttaaagaatcttttataaaatttaaccattcataatttttattgtaattcttatttttattacttgtttctataccttttattataaaatagatttcatctttattagttgtaaacttatttacaccaatactaaaaacaagatattccgcttcttttaaatattttacagctcctacaaaaaatttaataagcacatgttccagttctttttcattccctatataaaagtcattaatctctgaagaaacttctattttataaaaatttttttgttcttcagatataatttttataagatttttaagtcgcagaataagtttttgcatatcaaacaaattttcttttatttcaagtttattaacctctaaatcttttttctcttcaaaattcataatatccatccctttatacttttaaataatataactacataattttgattatgttgtatatgcaacaatttgttataatacctttatatttatcttttccgcgactgcgcgccttacgcggcagattacatctgccctaccgatgcttgctattccactttttatatataactttttattttaaaatattttcttatatgctaagttttgttagtgaacttcgggaggacgcgcttgcgcgtctcgttaggcgagccatcatctcacgcgcagcgtgaacatacttgcaacagtttgttataatccttttaatatttgacatttccgtcttatcttattgtagtatttctttgcctttttaatgaatatcggaaggcttaaatattgccttccgatatttatttaccttacacgctttcttatataaatataagaatatcaaaattttattattctatattataactaaaatggttccgcacaacgagcgggcggaaccatgactgctaattctgcttatttatctgctgtccttttatcaaaggatatgagactaaatccttactttccaaatcctcgttatacatatttacagctgagatttggctgttttcatacgttgtataataatatattcctttatccatattgcagcaggagctgtatattgtgatttcatattttccctcctgcatacatacacatcccctctgctgtgcaacagacccgagaatgtgaaaaaactgactgatactttcagattccgaccagcctgatattgagtttaattttgtaaacgctgctttcacaaaacgggaaactgacgataaatccccaggaagaccaatccctcccataccgctgcaatactcctttaacttcaccttatttgaaaactcatttgttggctcttttttggaaactttcatatagttatttaaattaaacatctgaaaatcaaatgtgggattgtttgttaaaactcccacggaattgtcgtaaacttttatcccctcttttacacactccactgtaattgagcagtccttatcagcgataagccaatgcagcggcgtggaaatcagcttcttattaaaatttacattccatatatttacatttttcagaagtttctttgtttcttcaactgtttcacactgccctaaaatccatggaataagctcatatggagcgacgttgtccttcccctccgcaaaatctttatattcggcgttatccgggaaattcagccccgctatgctcaggcctttttcattggttgcatcataataaagcggataatcatcaaccacatatgccatgccgattatagcatagtgagattccatatttttaacgctttggaatgaaaatggatagttccgcggagttattgttactgtttcagtataagaaaaataataatcaaggtttctgccaaaatagctgtcaactgttttataagttattgccgtgcacatcttatgccgcctttcgagatttattttctcttcagatttttattcaaattatatatctattatgtcttaaacagcgtattgataatcgttttaagcagtatcgtacttaaatatattaatctgattaatctgcggccccgctctgttcaaacacttaaaaactccgcttcaaatgtcattgctttataatcataagccggcgccggtacggcatttttgagtgtatttttttaaatatataaaataattttgtgtattttaaccttgaaatttctcctatcaagcagtataataacaaatactgcagaaaaaacatatatataccaatttaaaggagaagtaatatggtcacccttgataaaatataccacgcgtcacacgtcttaaaagaaatcatcagaccgaccgagcttataaaagctccgaaaatctgtcctgactgcaatctttacataaagacagaaaatcttcaggtcacaggttcctttaaggtcagaggcgcttattataaaatctctcagctctcagatgaggaaaagaagaaaggcgtaatcgcctgctcagccggaaaccacgctcagggcgttgctcttgccgcagccaaaaacggcattaaggcaaaaatatgtattcctgacggcgccccaatatccaaagttgaggcaaccaaaagctatggcgccgaagtctgccttgtaaaaggtgtgtatgacgacgcttacgaaaaagctgtatctttggttgaagaaacaggagccacttttatacacccatttgatgatgaaatggttattgccggccaaggttcaatagggcttgagattattgaacagctgccaaaagttgacgccgtaattgttccgataggcggaggcggtctcatcagcggcgttgggtttgccctaaaatcactggacccggatattaaaatttacggcgttcaggctgagggcgccgcttcaatggtaaaatccataaaagatgatgaaatagaaactctggaagacgttcataccatcgcagacggaatcgcggtcaagacgcccggagtcaacacttttgaaatttgcagaaaatatgtagacgacattgtaaccgtaagtgatgacgaaatatctacagctattctcgaacttattgagcgtgaaaaaatgatagcagaaggcgccggcgccacatctgttgccgccgctatgttcaacaagcttcctattaaaggaaagaatgttgtttgtcttgtttcaggcggcaacatagacgttactatactttcaagagttataaacagaggtctccaaaaagccggacgtttggctgagctggtagtagaactcactgacaaaccgggtcagctattgggagtttcagaaattatttcatcctacggtgcgaacgttgtttctttggagcataaccgttcggatgaaagacttgatataaacgactgcgtgctcagaatatccatagagacaagaaaccaggaacatttggatgaaataaaagacgcccttgtaaacggcggatttaaaattaaataaatcattattcaaagataaatattacaggaggtataatgatgaacaaaatacacacaaataacgcaccggaagctataggaccttactcacaggcagttgaatgcggagggctcatatatacgtccggacagattgctataaatcccgaaagcggacagattgaaagcaatgacataaaaggtcagacaacgcaggttatgaagaatctgactgcagtgcttgaagcggccggaagctcagtagacaaggcgataaaaacagtttgctttttagcggacatgaatgattttgcctcattcaatgagatttacggagaatatttcacatccaagcctgcacgctcctgcgtagctgttaagcagcttcccaaaaatgcgcttgtagaagtggaagttatagccgaaaaataataaaacaaattatagttaaagtctatgctgaataatttaaataatgtgaactgttcagattcaacatgcaataaaatatcataatacatttatagcatatttaattttaagcatattaaagacatccagtggcaatattgccactggatgtctttatcttgtataattaattaataaaactatatctacagaaaccgcacataacgtctgccttactcctatatagaaaattaaaagccaaatacttttactgcatttcaaatgcgcctttgggacaaaacttcatacattttccgcacagtatgcacaagtcataatttatctgcggtaatgaatgactgtctttttgggtaattgcattcttagggcagacttttattgacgggcatttgtggttttgcggacacttatctttatttataattactttcatagctatgtatctcctttttattatttttaccgcaaacattaacctgccgcggatttacagcattaatatactattattcagagggcttgtcaattattgatacacaattacatttatttaccactcctttttgacttcttcctctttaattaaatatgttcaaagaatttaaaggttctataaaaaactctgacattcacaacagaaccattataatttttatttttagtcttataaatactgcacattcaggattttgttttaatgtataacgttttttataattattaaaaactacctcctctctttccttatataattaactttaaatcaatctaaattataaattgatttataaaattagtactgaagatatgctgtataaaatgtctatatttattttttattcaatatttactattttttacatcagtaataaaattatatatattttttcattaattcaacatatttattgtacaagttaaataaatatttttcgacaaactattgctatttctcatataatatattataatataaaaatatattagattaacaggagggagagaatatgaaaataaaaagaaccttttgcacatatattttattcttttccttattttttgcggtcacatttgcatgtacggctgtctgttctgctgaaaacaacagaacaataaaggtaggatatcctatacaaagtttaatgaccgattttgatgaaaatggaaattatactggatatacctacgaatatcttgaagaaatagcccaatataccggatggagttatgaatttgttgaagttccgggcacagccggcgaacaggtctccgctcttatggaaatgctgaaaaatggagaaatagacctgatgggaacaacgctttatgacgaaagcataaaccgggaatttgcctataccggtcatagttatggttctgttgagacggttctgcaaactttaatcggtcaaagtaatgataccgccgttgactcaattgttatacaaaatatgcgtatagccgttacgtcagatacagatgaacaacatatacgcgaatttaatgaatactgtgatatgaatctgattacacctgagtttgttgtctgcgcaaattatgaagaccaaatagacgcactgaaaacaggccgtgccgacgctatgctcagcaccagtttgagtgcttctgatgaacttaaaacaatagcaagttttgctcctaagcaattttattttatattatcaaaaaataacgcatatagcagtcttatggctgaactaaatgaggcaatgcttgatattgaagccgcagacccatactttacgggaaagctttataataaatattttgtttcagacgataaaaaaataaaactttcagatgaggaacttgaatatatcaaggtagccggtccaatacgggtaggagttgatacaagccgtccgccgtttgaatacaaaaataaaaataccggagaactgaaaggtatctctatagagttattgaattatatatcagaaaaaacaaatcttcattttatatttaaagaagcaaaaaatcaggacgaattatataaaatggtcaaagacggcactgtcgacataatagcagaaatgaattatgactatgataccgccagagaaaacgggctcgcaatgtcgcgtccttatacctcaagtcagtatcttctgattatgggagataatcagagtcaggaaaatattgtaggaaaacggcttgcgcttcctaaatattctttatacaagggagagaccattggaaaagttacgtggtatgattctgtttatgactgcctgattgcggtaaaaaacggcagagaagactacacttatataaactctctgaccgccgaatattatctcagccagcccggatatgaaaacttgaatatgatacctcaaacatatacgcctgcagtttcttgttttggatttcataaacccgtaaacaaaaccctgctgagcataatgaataaattaatactgacaatatctgaaaacgagcttcaggccataataaatattaacacaatacagcaaagagattataactttgaatattatatttcaaaatatcctatacagataatttccggtatagccggtatagccggtatatttttaattataatgcttctgttgataataatactggttcagcgcaacagacgaaataaagaaatgcagatagaccttcaaaagcacctcagcttatattcagtttctaacgactatttttttgaatatgactttaagaaaaacaaaatggtattcaacaatcctgatttaagcagacaagatgattcaaaactgatagaatacatttttaatgacgcagaccatgagatgtcagagaaaaaaatggaaggccgagacgcttttctaaatataatacaaagcggcaaagacggagttattgaagcgcaaatatattgctttgacgagaacctgcactggctgcgcataacaatggaaaccatacgcgacgataatggaatgcctctctatgctgtaggcagaatcaatataatcgacgaagagaaaaatgcagaagaaagtttgcttgaccaagcacagcgcgacagcctgactcatatctataacaacgaaacaagccgaagactgatttctaaaagtttgaccgaactaaccgaagccgatatgagcgccctgctgattttagatcttgacaattttaaaaatatcaatgacacatacggtcatctatggggagataaaatgcttcgcgcagttgccgatttactgaaaaacagttttcgttccaacgatatagtcgcacgtcccggcggagatgaatttttggtttacatgagcaagataagggatacaaaatcacttgctgaaaaatgcgcttccctgtgcagttcagttcacaatataaaacttgatgacagcaatcacttaaccataagcatgggtgtagcggtcgcaagagccggaatgtattatgacgttttatatcagactgccgaccaggcactttacaggtcaaaaaattcaggacgggataaatttgaaatagtggagtagcgcacatattagacgcgatgtaaataacacaagcatttgttcaaaattaaattttaacttgattataaatgagttcggtaatataccgggctcattccttttattttaataatattctattgctttattttataatattcttcatgtctgccacatctatttaccgcccaaatatcatatctacatattggacagaaataataaagtcaagtaaaataaataaattctatagtaaacagtatttttagtgaactgcggcagggcaaactttgtttgccgcgttaggtgagccatcatctcacgcaaagcgtgaacatacttggaaaagattgtattaatccttttttattacatgttttcacatgactgcgcgcctaacgcggcgtacttcgtacgtattgcgtattcatattattgacattgtaggtaaatcaaaacaagttattttgtatcacacccaccatactggtggggtcacagacattgtaggttatcaaaacatgttactttgaataacatccaccttttcaggtggagtcatacctaccgatgcttgctacaccgcattttatataactttttatttaaaatattttcatatgctgagtttttagtgaacatcggtaggtgtgaccacactttttttaaaagtgtgtgtaatacatactaacttgttttgccattacatgcaatgtcattagtatgtatactcaatgcagacaacgtctgcttcgttaggtgagccaccatctcacgcgtagcgtgaacatacttggaaaagattgtattaatcctttttgattacaaatttctccgtggctgcgcgcctaacgcggcagagtgtaaccacagccctaccatagttcgccatgtgaaaaccttaacagttctgttcattatattgtgacctctacataaatgactatataatttattactttattaaaaaaatataaataactcttgacaagcttaactgtaactgttataatcacagtataatctgtaattaatttagttacagattaaattttaggaggtgctttatatgaaatatgacgctgtaattatcggattcggcaaaggcggtaaaacacttgccgggaaactcgccaaaacaggaaagagtgttgctcttattgagaaagatccaaacatgtacggcggaacatgtataaacgttggatgtattccatccaaatccctaatacacagtgccgcttctgccaatccatatggagacgcagctgaaaaagcaaaaaaataccgtgaagctatagaagaaaaacgaagattgaccaaaatgcttagaacaaaaaattatgataaattggcttcctctcctaacataacaatttataacggcacagcccgatttgcagaaagatctaagattgaagttaaaaccggcggcaaatctattatcattgagggagataaaatatttatcaataccggttcaacgccgcgcatacctcctataagcggcctatcaacaacatccggaatatacacgagcgcggaacttatggatttagatacatttcctgaaaagctcactataatcggcggcggatacataggggtggaatttgcctctatgttcagcaattttggaagcgatgtcactgtgattcaagacggtgaaacattcttgccccttgaggacgatgatatagccggagaaataaaagctattcttgaaaagagcggcgtaacattcagacttggagccaaaattaaatatgttgatgaaggacccaaagtggtttttgaatggaataaacaagaatacagtctcgaatccgacgcagttcttgcagcaaccggacgtattcccaacacttccgaactcaactgtcaggcggcgggcatagagttaacctccaaacaagctgtcaaggtcgaccaaaatcttcgtactacagcagaaaacgtttgggctatgggagacgtgaccggcggacttcagcacacatatatatcccttgatgattcaagaatagtatggtctcaattgtcaggctcaggaaattatacagctgacagcagaaggaatgttccatacagcgtatttttatcaactccgtattcaagagttggtatgaacgaaaaagaagcgcaaaaatccggcatagattatatcaccgcagcacttccggtttcagctattccaaaagctcaggttctcaaatccactgacggtatactaaaagcgctgatagataaaaatacaaataagatattgggagctatgctgttatgcgctgaatcctatgaggttataaacattatcaaactggctatggatatggacgcggattacaccgttctgcgggaccgtatatttacgcacccaactatggcagaagctttaaacgaccttttcactttatgacaaaataaagaattgactaatccgcagtatctataaaccgtatatcaacgtctcttaaagagatgtaaaatactataattttattataagaggaggtaaaacatgaaacgtaaaataataatttgtttcattttaacagctataactcttctatcctcatgcgccgcaaaaagtgtaggcattattccttcctctgaaactcctgattctgccgccggagcgtaccacaaaatctcatccgaagaagcgaaaatcatgatggagagcggcggagttactgttgttgatgtaagaagaccggaagaatacgcagaaaaacatatccccggagcaatacttgtgtcaaatgaaactattgcagaaaaatcagacgaaatgctccctgacaaagaggcggttctgcttatatactgccacacaggagtgagaagcaaacaggcctctgataaactgataaaactaggttataaaaatatttatgactttggcggtatagcagactggcaatacgaaacggaaagcggtgtgacagaatgaacagtgaatttattgtagcagtacacgcaatggtatttcttcatcataaagcggacactttgtccagcgaaacacttgccgaaaacgtctgcacaaaccctgtgagaatacgtcgagtgcttgcgaaactgaaaaaggccggactagttgaaactcgcgaaggcagaacagccggtggatattcatatcaaaagactaggcaagtaaccttgggtcaaatagcaaaggctttaaacgtaaagtttgccgacactacctggcacagcggcaacaaggaaatgaactgtcaggtagcgtccggtatggcaggatatatcgacaatctctattcaagtctgaatcatctctgcgacgaatatttagatacgataaccattgcggacgtggaaagagaattatttaaaaaggaataatttgaaggcatgatatttatatttttcactttgcctatatgtgatataaaataaatgcagactcaaaaaactatttagaaaattaccggcagactgttttatttataccatgatgatagtctaaggtatataaaaaaatattttaaaaaaataaattataaaaatacggtttagtaagcatcggagggcaaacgcagtttgccgcgttaggcgcgcagtcgcggaaaagacaaatataaaaagaattataacaaactgttccaaatatgttcacgctacgcgtgagatgtctgctcacctaacgagacgcgcaagcgcgtccttccgatgttcactaaaaaactccgcatataagaaaaccatttgagcagaacatatactgaacctctgttccgataaaatcatcacttattgcaaacgttcccgcctgctcattctgtctgcctttcgaaaaatcttcagctatataactcagctgtttcacaaacttaaccgcatataaatccggcagccatgttgaactgtttgtaaatgttaaagatccttctgtcaaatcctgcggcagtgtaaatgttataaataattaactatttaaaataaaaatccattaaatacttcctttttaaatagttaagaaatacatataactccgtttcagttttttatgcgtaagtaagtatattaaaaacaattaagtgtagaagtaacaaagtcaaaaataaaaagttatatagaaaaacaatatggagaagcgtttgcaatgacaatagaagacgcttttagagctgaaaagtcttatgaaacaagaatggaaagctcccattgactacatcaactcttttatcaatttcggtgaactcttttaatcttttttgtaacacatcattgacaaacctacaaaaatggggaataaatctttaataagtttaatattgactaaatcagcaaaataaaaactcggctgagaatgtttttttattaccaatgttcttattgtacagtaatatgaattatgagatagttatagaacacctgattaacggatgattttgtttgaaatttatataaattttgcatattaatctgttttttataacataactttactttgctcacgaaagagttttcataaataaaataatataattataatactctatttaaaactgtaaaattattttattgataacaaataagtgactggacatttaaaatagataatgctataattttatctgaaacattaacaataacagataggggataaaaaatgataatagatatacacgcacatgtgtttccgaataaaattgcggaaaaagcgtcacagggaatagaagatttttataatatagacgtgcctaataatgggacaatagaaagactgctggaattgtcagacaaagccggagtgaataaagttgttattcattctcctgcaacaactcctcatcaggttcaatcagtgaataattttatatatgactgtacccaaaaatatcccgacagggttataggatttatgactttgcatccagactttgagaatataaatgatgaagttgagcgatgtatctctatgggattaaaaggcgttaagctgcatccggattttcaaaggtttcatatcgacgaccataaagcattttgtatatacgaagcaatttcaggacgattgcctcttttagtgcatacgggtgattttagataccaatggagcaaacctgaaagaatggcaaaagtgatggatgaatttccggcaatgacagtgataggagcacattttggcggctggtctgaatgggacgacgcagcaagagtttttaaaggaaaaaatatttatgttgatacgtccagcactatgtatagtgtgcctcctgaacatattaatgagttgataagacagtatggaacggatcatgtactcttcggttccgattatccgatgtgggatgctggaaccgaacttgaatacatagagaaacttgatttaacaaatgaagaaagagaacttatacttcataaaaacactgaaagaattttaggtatttaaaatattatattaaacagtctcaaaagtcctaaagttataagtattattccgggtattgcagtgagaaacttatcatttatctttggaaattttttgactgttccgcctaaaaagattccgaggctaagcataagatactgcatacaaaatattgctacaggaaaccagaacgaagcgtttgtgccaagtccaagcccagttgccgatgaatccatagaaaccgcgattcctatgcacagagcttcttttctgtcaatatcaagtgaattatccgtgtcgccgaagctaagatcagatttgttcagcgacaaaagcatataaattccaataacaaaaaatattatggctccaattaagtcggagacaaatggcgaaaatattactgaaatagccaaacgggacaccgctgtggatataaaggataatgtgaaagacgctaagcttattatcagacggattgtcttaggtacatatatattttttacaccataggcaactccaatgcccagggaatcgaaactaagtataaacgcaagcaaaaaacaaaacagcatatcatgatacctcccaacaaaaagttctgctgttagtatcaggatatgccgaattttggttttagtgtgttttgtcttaaaaatgtgattaagtaaatttaatttatattctttttaagcagccgaaaggtatttttatcaaaatctattaacccgtcttgtttcatctttgaaagttctcttgaaagagcgcttctgtcagcacagagataatcagcgagatcagaacggttcatatcagttttaaaatagcttccggagttatttgcaataattgatagataggttagaatcttttcacgcaaagtttttttagatattatctcaagtttttgaacaagctcaatatttttagacgccataagttttacagcgttttctattaaccggtggtgaaattcgcacgcagctgagcaggaatttaatacttttgcaaatgggagaaacaagacttcgcagtcagtttcactgtagaatgagatagaatcagaaaatttgtttgagcacagactgttttcaccaaaaaagtcgcctttataaagtacgcttattagagtgtgattgccattaatatcacacattgtcatatgtattgtgccgcttaaaactgttacaagacaagcgttatcaacctgagccattataatattgtccttcttaaaagtctttttatatgctcctacacagactaaaaccgaacttatttcatctttttttattccttcaaacagtggaagctcagttgtgtattgagtgatttccataaaatcgtcctccgttaattaaactataaatatattaacacagtttattatttgttgcaatcgcaacatacatacatttaaaaaaatgatatagtttgaatacgaaataaattaaaatatgtttgaaattcaatgataatctttttatatgtagaattattcaaaaaatataggaggaagatataatgataaggaatattgtaaaaattgatgaagataaatgtaatggctgcggactttgtgtttcagcatgtcatgagggagctatagaactgattaatggtaaagctagattaatacgtgatgactattgcgatggtttaggtgattgtctgcctgcatgtccggttgacgcgataacaattgagaagagagaagcggcagaatataatgaagaattggttaaaaagaacatggaaaagccggtacatacaggcggatgtccgggcagcgcattaaaagaatttgcgcgcagtgagagtaattattccgaatctgattatgagtccaaattaaagcagtggcctgtacaaattaaattagttccggtcaacgcaccatattttgataatgctgaaattttagttgccgcagactgcgccgcatatgcacatgcaaattttaatcaggaatttatgggagataaggtgacattaataggctgtcctaagcttgatatgactgaatactccgaaaagcttggcgagatttttaaagcgaatcaaataaagagtgtaactgtggtaagaatggaggtaccatgctgcggaggattggagaatgctgttaaggtagctttgtcaaactccaataaagatatatctttaaaagttattacaatttcggttgacggacatgtgatgtaaaacgtcttatacaataaaatgtgacgtaaaaaaactgaagggttttgtccttcagtttttttatttattattatttatacagtcttcttcactgctactattatacgtatccgtccgccgtttgagggcaatttgtcatagtatgcatacagtgtataattgtcactgcctataatgtcgctgattggcttcagcctatataaagtagaagaggagtattccttttcatatacttgaacgtcagcagatatatcatagctctttccgtcggctgtaaggcttccggcgcttgtaactgttactgtgccctttacttcgctcagcggtgacattattgacggattgcttgcggatgaaagccttactccctgaccgctgttcactgaatatattgttgacggacttgtaaatgaataactgctgccgtttactatatatgaatatgagccgctgacagatgttccgaagctcatattctgtgctgaggtcattactccaaacgtataagaatctccggttacatcatttaaaataagtttatctatttctccgcttgaatttttgtggcaatatagaattttgtttgaattaatattcacattattaagacgggtaggataaatctttttatataatgacgggtcatttttatttgttgttcccacgtccaaaatttctacatcgcttgccaaataatcgtcgccgaaacgttttgtgtcccaacggaaataaccgctgacctttgcgctgtccgttctggaaattttagctattccttcatttatactaacagtgactacagaatttttatagtcctcataattttggctgcacgtataatcgtaggtttcaccgtttgccgctgctactttgatataataatttgaataatcctttaggtcctctgatgtataagttttggttcctgtttcaaagatatatcccactatttccgaatcagttactgttgaggtaaccacgtctgcaacctcgttagtttttcccaatagcaaagttatcgtttctccaagtgcgagattaccgcttgaagacagtttattgaaagcatttgaaccctcaactttatatgttacgcctgagacaacaatttctgtagggttatctttattcgggtttgctttgtcatatacacctgtgactttggtagtataggcaaaggccatatttagttcaggtatatagtagagtatgtcgtaggtttttatatctgaaattgtgcaagcaactccgcctctcatgatagtagtagatgaattaattccgagagtttcagcccagttattctctgagtttattgtgtaaggaccttgcatattacctttttcgtatactacgtaatctatatttccattagtctttttaatattaagaacatctcccatttcaaaagatgtttttatagctccgtaggtggttctggttgttccgtcataagcgacggtgccggcaggaatatccaaagttgtcatattgccgcctttgtataccactatgttgtcacttagtacggagtataccacatatttttcattaggagaactgtccgcctttggaaagaagcctataacagttttgttgtcctttaaagctatatctcctttcattccaacatatgaataattaaaatcagaccttattttatatgtgccgttgtcggtgaagacctcatcgccggggatagaactgtcctcttttgaagttgaaatcagcgtcacatcttcaacaaaagcgacatcgaaaatagatataagttttgaggatgaatctttctttttggttcttaatgtattatatactaatgtagaaacgtcttttcttgtcatgttggaaccgatactgatatctgttaggttatctgtcatatcaagactgtcagccattcctatttgaccgcttggccaggctacgccaaaatcgctgtccgaatatcctaaaaccctgagcataattgttacagcctcttcaaaagtaactatatcatcaggcttaaaagaagcgtcagggtatcctgatacaagattgtttgtaactccaacacgaacgtatggagcagaccagtttgaatatggaacatcataaaacggagaaattgcaaggtttgatgctacgctgttgcggtaatcagaagacgctacagctatttttgtgaattccgctcttgttacaaagtcatccagtctaaagttcccgtcagggtcgccgttcataattttaagttcagataataatcccaaaacatcctgctgagaattatcactgccgaaaaccgttattgaaaaagcagaagcagtaaggcatatagctaaaataagtgaaagtataggcctaaaatttttttcagatttatagttcataatttcctccaatctctgtggtttttatcttattcatgtctgagagcgtcaatagggttaagattagcggcatttttagcaggcagataaccgaacatgattccgatacctacagaaacaccgaatgaaactcctattgctgtcagtgatggtagcgcggtcaaacctaagagccgtccaaataaaacggcgaggattgacccgaccacaattccaataagacctccaacaccgcttacggttgcagcttcaataacgaactgagattttatatccctcgatttggcgcccaaagacttacgtataccaatttctcgagttctttcagttacggacacaagcattatattcattattccaataccaccgactaaaagagaaataccggcaatacaaaccaaaagagtactcatagtgcttgtcatggtacttgccatatccattatctgctttatgcttgtaacattatagtaatcgctgtcgccaattttgttagctaaaaactgctttacttttgtcattgcatcatctactatatcaacgctgtttgtctgaacagtgtaggaactgataaatgaactgttggacattgatacagcggtggtataaggtatatagattacctcatcctgtcctccgctggttgaatcgccttcttctgtcagcactcctataacggaaaaagtatctccgtttattttaagcttttgtcccagtccgtttccgcgtccgaacatttctttttcaatatatgtaccgataacgcaaactttttgttttttctctacatctacaaattgtaagaacctgccttgttcaagctccagctgttttatactgcagtagctctcgtcaactcctgttgcggaggtagataaatcatcgcgcccaactttaactttagcggaagcaaccataacgctagggctgacagccttaaaaaactcagggttttggtcaacaaaagtatacatgtcattttcgtcaattgttcggcttccgcccctgtcctgaacgctgacagttattgtgtctgttcccagctttgaaaattgatctgtcatcattcccatcattccgtccatgaggctgataagtataataactgctccaactcctattattataccgagcattgtaaggagtgaacgcattttatcaaacataagattagagaaggcaagcccgaaagattttttaagcgtcattgttgtcgtcctcctcgtcatctccggcatgggctactgttgcaaatttttctatttcaggcgcgccgtcgtatgttatgcgtccgtcctgtatccggataactcgctcggcttgggcggcaattgtattatcatgagtgataagcacgattgtattgccttcgctgtgaatctttttcagaaacttcaatacctctttaccggttttggagtcaagagcgccggtcggctcgtcggccagtattatggacgggtcgccggccagggctcttgcaattgacacacgctgctgctgtcctcctgacagctgctgaggcatatttttagcttttgctttcagcccaaccctgtcaagtgaaatgagagcgcggcgttcctgctctttttcagaaagtccggcatacatcagaggtagctcaacgttttgctgaacattgattttggggataagattatactgctggaatataaatccaagttctttatttcttatttcagcctgttcatcatctttcatggtgctgacgtcagttccacggagaaaatattttcctctgcttggaacgtcaagacatcctataatattcatacatgtagattttccgcttcctgactgacctacgatagcgacaaattcacctttatatattttcatcgaaactccgtcaagagcgtggacttcagaatctcccattatatagattttataaatattttgaaattctataagaggcgtttccattacattccacctccgccgggtctgccgcctgaaccaccgccggcgctgtctttcattctttcgtggctctgctgcatcatttcttccatagaatttccggttcctgccgtggagtatagaatttcaccctcttcaaccccgctgaacacttgtatatattcgccgtcgctggaacctgtggttactgaaacagtcttataaccttcaggagctttatcgttttcttcggttttatcacccttaacatatacagtgtttccacggttaagattgctgacaggtatagccaaaacattgtgaacactggatataataatgttggcttcaacgttcattccggggagaagcgcgtcatcaaagtcgataatatttactttgacagggtatgtggttactccatttgaacctgcagttccgttaacgcttatgttttctacaacgccggtatattctttatctgtaacgtcggtagtgattgtaactttctgaccggttttaacatttttaacatcaagttcatcaacgtttaaagtgcatttaagttcactcatatcataaattaccgccatagctgaactggaagcgctggcagaagtcaactgagaggacgatgaactgcttcccgatgagctgtaagaagaagtagaagatgaaccgcttccgagattgtcgcctttctttttgtttttggtaacaactgttcctgatatcggcgctttaatggtgtagtcttcaagctgtttcagaagcttttcttttgacagaacagcatcatcatacgtcatttttgcagttttaacagcggaattcagtttgtcatcgccgagactggtagttgcgtttgaagtattctgctgaatcttagcgcgttcaagagcctggtttgcgtcatttaaagacaacagtgcggatgaaatttgtgattcaacagagtcagaatccagcatagcaattttttcaccattataaacatgactgttttccgatatgtacagagagcttattttgccgcctgacgaagctgtaatgctatcttcggtaaggttttcaaaagttccggcatcgttacaagctatatctccaaccatagctgtagcagtatctcccgatgatatggctcccggattatctacttcaatagtgacctttttatatgaagtaaaaccgcttccgctttcaactaaagcaccgatttcggtgacaactccgcgtacagacgagccgtttttagttaaagtaagatctgcagcttcgccaacatgcacattatccgcatcagctgtattaaacggaacttttatctttagttttgaattatcaattatatcagcaatttttgtaccggcagcaatggtgtccccctcagagatgtgaatctctgtaactatgcctgtgtggtttgatttgagagacaaatcatcccttgctttcagtgcgtcattatacgcttgctgtgctttatcaacggcaattctggcgctttcaacggaactggcgctggtagctgtatcgcgtacagttttagaattttcatttattgcgtcgtcatagttctttttggctttagctatagctatatcggcgctttgaatactgttttcgatagtactggcgtcaattgtgtacattaaatcgcctttttgaacagtgtcgccttcttcaaaagggtcatccaaaatttcacctgttacatttgctgtgattgaatactcgttattcggttcaacaacagtactgtcatttattttttcttcaatatctcgcttttcaactttaattaaaagattgctgtcttctaattttttccctagcctgaccgtgcttataccaataaataatacaagcgctaatacaatacagatgacagcgctccaaattttatggtttttcatcagtttccataaggcggcaaaaaatattttaagtttgcctccgatgaaaaaagtgaaatctttgattttattacgtactaaaataaatttgttcatgttctgagcctcttaactgaaaatgtctttgtctttttctgaaatattttttataataactatggattcttcaattaattcaagcattgttcggaatttttcttcacccatggtgtctttaactgtgatgcaatttttattaaaataaggatctatttttctagttatgtctttagctttttcggtggtgataagataagttctgcgtctatcgttttcgctgttatacctgagaatatacccttcagattctaaagaagagatatattgtgagaccgccgcgcgtgagacgccgaattgcctgctgatatcactggaagttattttatttccttcagacatactttcgtctattgtttttaagataaaatattctctgttggatatcggcaatacagataaaagacaattaagcgcttcttttatctttaagattaatatctgtgtcttttttacatatgtatcctggcttatttttgggtttgagccaattttagacatatactcctatctccttaaaatttaacagcggcttaatggttaagcaacttaacaaacattatagcagagctaaaaaagggtgtcaatgtaatttatatataaaagccccaaaatatacttgatatttattaacattatgatataatgactgttacatagaaataatttgtaaggagactaaagtatatggataattttatatttgataattatactaaaataatatttggtaaaaagacggaagaaactgtcggcgaagaaatcaagaaatacggcagtaaaattttactccactatgggggcggaagtataaagagaagcggtttgtatgataaaataatttcctctcttaattctgccggcgtagagtatattgaactgggcggagttcagccgaaccccagattaggtcttgtaaaaaaaggagtcgatatttgtaagcgtgaaaatgttgaagcaattttagctgttggtggcggcagtgtaattgactctgcaaaagctatcggattaggtgcgttgtatgacggtgacccttgggactttcatgcgcgtaaggctattcctgaaagaatgcttccggtaggtacagttctgactattccggcggcaggcagcgagtccagcgacggaagcgttataaccaatgaggatgggtggataaagagaggtcttcacagcagttgtatgtatccgacattttcaattatcaatcctgaacttatgtatacattgccgaagacgcagatagcaaacggctgttcagatatattcgcacacttggctgagaggtattttactaatacaaaaggcgttgagtttacggacagaatgattgaagctgcaatgaagacagtgataaataatgcaaaagcaatggttgacggaagcaaagattatgacacatgggcacaggtcgtttgggccggaactattgcacacaataatctattaaacaccggcagagtgggagactggggttcacacaacattgaacatgagctgagcgctcactatgatattgctcacggcgcggggcttgcgattgtatttccggcatggatgaaatatgtgcttaaacatgatgtaagcagatttgttcagtttgcgacaagagtatttaatgttgaaaacgatgtttttaatccgaccaaaactgctatgaacggaatagaagcttatgagagatttttgcagtctttaggtctgccgaaaactttatcggaagtgaatattggagatgaaaagtttgagcttatggcaaaacaagctgttgaaataggcggaggcaaacagggaaattttgttgaattaaaagagaacgatatacttgaaatattaagaatggcgaaataaagacaaagttgtaaggttttagacatatattttaatccagtttgttacatttttgataaatttttaaaaaactattgcaaattgattttgataaggttataataacgtcattatactttaataggaggttaagcaatggacgcaagtcaattacagaacttttatccgtttcttatgacggccttgattcttgttgtgttctatttcattttgattagaccgcagaagaagaaggaaaaggcattgaaggacatgatttcttcattaaaagttggagatgaagttgcatcaatcggcggtatccatggaaagattaacagagttaaagacaatcttttcattttggagacaggcgttggaacaacaaagtcttatgttactattgagaaaagcgctatagcgcgtcttatcagcgaaggaacatccaaggaaagcgatgtcgctcctttggaagaagctgctgatgccgagtagtttttaaaatttgacatttagtattcactctttgcatatagtttaataactttaaattattgcaaagggtgtgtgctgtatgacaagcggtgcttttcaaaaaagcgagaggcagggaggattttctcccgggggatttaagcgtgagcaatccggcggtgaaacgtcaggaggagataaaacaatttcttctctcataaaaagtatctgcataggttttggagcggctttaattttgctgtttctgacttcggttgcggcttcattttatgatattccggaatttgttttaaactatattgttattgctgtatctcttatctgcctatttatggttggctttaaagccgccgggtataatggtaaaaacggtcttttaataggtgtgatagccggtgtagtctatgcggtaatcgtatatttgattggctggctgggatttaaaagtatttcgttttcccccgaggctatcgctaattttgcggtagggggagctgtcagcggtttaggcggagttgttggtataaacagatataccaagaaaaaacgcaaacgctgatacatacaagttataatagtaaattaataattttagtttatataaaggagaggttactaatgaagagaataaagacattaaacagtgcttcactgaaaaacagcgcatgcaagggcggctgcggcgaatgccagacatcttgccaatcagcttgcaagacatcttgtacagttgccaaccaaaaatgcgagaacgataataaataggatataaataggcaagtctagtatttgccgatattctgaattatcaaataaagatagcattgcgggcgtccttgtttaacataggacgtccgatttacgtttatttacaaggagattattatggtacatacttttaaaatgtttgacaaatatatagctcttgatgttaacagcggttgtgttcacgatatggacaaactttcttatgatataattaattttttgaatgtgaagaattttgctccaacttcttcagaagcaaagtttaagctgattgacgacttgaaatatgattacgaccgcggtgaaatcagtgacgcacttgcagatattgctgaattatatgaaaacggtatgctgtgggcaaaggatgattttgaaatcgcttcaaatctaaaagaaaatgcaccggtaaaagcgatgtgtcttcatgtcagccatgactgtaatttaagatgcaaatattgttttgccgacgagggtaaatatcacactgaaaaacgtgaacttatgactgcagagaccggaaaacgcgctatggattatttggttgagcattccgggcaccggaggaatttggaagttgatttttttggcggagagcctttaatgaactttgaggttgtaaaagaggttgtggaatatgccagagaattggagaaaaagtataacaaggttttccgttttacagtaacaactaacggaatacttcttgatgagaaaaaacttgaatatattaatgaaaatatgtcaaacatagtactcagtattgacggaagaaaagaagtaaatgaccgaatgagataccgggctgacggaagcggttcatatgataaaatagttcctatttttcagaaagttgctgaaagcagaaaccaggataattattatgtcagaggaacttttaccagagaaaacctggatttttcaaaagacgtaattcatttagctgacttaggctttaagcagatttctatagaacctgttgtttgtggcgaagagactgattattctttaagagaagaagatttgccgaaaatctttaatgagtatgaaagtttagtaaaagaatatgtaaagagaataaaggaaggaaatggatttaactttttccactttatgattgaccttgaagaaggcccttgtattataaagaggctgtcaggctgtggctgcggctgtgaatacctagctgtggcgccgaacggagatgtttatccctgtcatcagtttgttggcagcgaggaatataagatgggaagtctctacgattccaacgggctaaataaagaactgcgttcgacttttgaaaaatgcaatgtttatacaaaacctgactgtgacagttgttttgctaaatttttctgcagcggaggatgtattgctaacgcttgtttgattaacggtgatatgaataagcctcataaattaagctgtgaaatgatgaaaaagagagttgaatgcagtttatatgctaaggcggcactggcggactgatattaaaataaatttgagaatgaggtgaatgggtgtgtcaggtcaaaatgaaaatataaacaataatctaaagaatatacaggaagaagaacatttgataacgtttcaggatattgttaaggataaagaaataaagacatatcttgaaatgggagataaatatctgggaactttaggatacacaaaccattcactgcttcacgctcaaagagtagcgaagattgcgcatatgatacttatatcgttgaactatgacaggcgcacagctgaacttgcgcgtatagcaggatatatacacgatataggaaatgtaataaaccgtgctgaccatgctcagtcaagcgctatgatggcgtttaatattctcaccagaatgggaatggcgccgcttgagatagcaaaagttataggagccataggaaatcatgacgagggaacagggatacctgttaactcattggcttccgcattaataatagctgataaaaccgatgttagacgcagccgtgtaaaaacaagagataataaagattttgatatccacgacagagttaactatgcggcggtcgtgtcagaagtttcagttgagagcagaagtaaaaattcagttgaaaccaaggttataaaaatggatttaaccatcgatacagatatttgctcagtaaccgattattttgaaatatttttggcgcgtatgataatgtgccgccgcgcggcagaacgtttgggagctaaatttgaactcaatgttaatggaacaaaattaacttaattctgttgaaattttgaaaattattaaactttatttaaaatcagcggctaaaccgctgattttttatttgttataaatctgtttcgttatataaaattttattaacaattttatattttctcttgactaaatcaaaatctaaggctataatagtccggtatgctaatgttgctatgtttatacataggttttgtgtttgtattttgtttgcatacattatattgttgtccggcgaggggtgattatatgttggggagtaagaaaaatatcgcttctgcatcagcagttgttgcggtatttattttgttgtccgcattgttttcatttctgagccaggctttaattgttgaaaaatctaaaactgagcgtattgtttccatttccgattgtgctgatttcggtatatctatgagtgcgcctcctgatatggaaagccatcccggaaacagtgatacgtttattatatccggtaatgttattgatagaaatttaagaacagattcatattttggaacgttttacaatgaacagtctatagcccaaagatgggtagatggtgaaatagcttgtatgataagtgagcgaacatcgtttaatgttggaagcgttgtaatgatttgttaaggacttctatagttttataaaatcgaaaaataattaaaatatatatgagaaaagctcaaatttaaggaggagaagaaattgtccagaagtttagtgaaatttgcggctataattttggttatcgcggcacttttctatgttggattgtatggtcttgattttaccgagaaatatagaattcccggtataatggacagtgatggaatcactcagggcctggatttaaaaggcggtactgttatagtgtttaaggcagatacagacgagccgtctgaagaggatatggataacgttgttaatctgctgagaaaacgtcttgattttcagggttatacagaagccagcgttactatgcagggttcaaacaaggtaagagttgagcttcctgatgttcaggattcagacaaagcggttgaaactctcggagcaacagctcagcttgagtttaaagacgctgacggaaatctgattatgacaggcggcgaggttaaagacgctaagtcggaatatggtcagacagagcagggaatatcaaagagttcatattatattagtatgacatttacagatgaaggtcaaagtaagttctcagctgctacgaagacagcagcggctgcggcatcatcaggtaagaacttcatttcaatagaaatggatggaaacattttgacagcgcctcaggttaagcagcagattgacagtgagacatgtattatcacaggccagtttactgctgaggaagcaaaagctctcgcagctaatattaagtcaggtcagcttcctttctcattgaagacagacgaggttaaggttgtaagcgctacattgggtgaagaagctttatcaaaggcaattacagcgggtattattggtttgatacttgttcttttgtttatgcttattgtatatcgtatcatgggtcttatggcggatattgctttactgttttatctttcaattgtacttattttgcttgcaaacttccacgtaaatcttacgctgcccggtatagcgggtattatacttgcgataggtatggctgttgacgcaaatgtcgttattttcgagcgtgtaaaagaggaattaaagcttggaaagacagtaagaagttctgttgagtcaggatttaacagagcattgtcagcagttatagattcaaatgtaacaactatcatttctgctgttattttgtggtggcttggaacgggaacaattaagggatttggtatgacattgcttatgggtgttatcgtatcaatgttctcggctatatttgtaactaagttcctgctcaaacagatgataggaatgaatgttagaaataactggctctatggtgttagtaaaaagaaaaccgggtcagaaagtgtgaaaggaggagaagcgtaatgtttgatatattaaagaaaaaatggatattctttggtattgctattgttttaagtttaattagtattgtttctctgattttccaaggatttaatcttgatacggatttttcaggcggtatagcattaacatatgaaataaacggagaatttactaccggagatataacatcattggtaaatgacgcaattgaaggcaaaaaggcatcttctattcagaaagccggttcagatgttattgttaaagttggatatgataagaatatgacagatgatgaaagagcagcattttccgcatctgttaaggaaagtcttactaccgctttagaaggtagattcggagccccggttgttgataatgaaaatcagaatacagaggcagccgctgaggcaacagcagctccggaaacaacagctgcaccggatgaggccgcagctgcagaagctacagcgcttccatcagctactccggattctttggaagcaacatcaagaggaacattgacctcaggagttagacttaagagtcttgatgatatttctccttcttcgggtcaggaattggcgcgcagcgctatgtggatggcattgcttgcttgtgcaggcatactggtttatgtaaccatcagatttgagtttacatcaggatgtgttgctataatcgcattagttcacgatgtattgattttgctcggtgtttattcattgttcagaatatcagtaaatattaactttattgcggcggtgctgactgttcttggttactcaattaataatactatagtaatcatggacagaatccgtgagaatacacgtcattccagaaaagaaacatatggcgaaattgctaataacagtatttggcagacaatgactcgttctatcaatactactataacaacattgcttaccattggtatggtttatataatcggtgtttcggctatcaaagctttcgctcttccgattattatcggtattgttgttggtttcttctcttcagtatttgttaccggtccgctttgggctacatggagagattctgctgttaaggctaaaaaagctaattctgcttcgaaagccggagctaagaaatctaagtaatatttgttttattataactgcatcgcaatttaactgcgatgcagtttttttgtaaagtttaaataattaaagtaagtttgtttcggaaacttgtttttggaacctactggaaaataaatcgtctaaataatattaacttttataaaaggagtgaagcagtaatgtttagttgcagaaatttaaataatgggattttaataaagtgttcagtatttataattggtttgattataatatcatgcgttttattcacaaaagtatacgcagccaacggtgatataaaagatactatatacacaactgatattctcacacaggtggatggtaaaaatatacaaagctattcgataaacggggagacacttatagcacttgaggatttagaaaattacggttatacggtctattataatgataatatacggtcggtgtttatcactaaaaccggaactgtcaatccggattataatcccagcattgagcgcggaaaggttgggggaacagcgggatacacatatgagacagatataaacgcctatattaacggcaagttgatacaagcttatgcaatagacggcaaaatggttgctaaggtggaagagatgggaaccagtgaaaaccttagtgaggatgttaatacaaaatatcaaatgagctatacatatgatgactcaaaaagattgctttcactgtttacctcgcttaagaattcagtttcatatgaagaagctgtttctcattatttgagcaaaacattggcgtgggaggaacattacactgaaaatattcacaatgaaaacaactggctgattgagaaaggtattggcggactgcctcacggcggatactataacactatgaatcttatatataaatcaggtcttatagtcgaccttgaatctgtagtaaattcatactatctaagcaacgatattgagtacacctttagtcctgacggttcaaaattgttttttattaatcaggttgatggggtaaatgaatataagcagattgatttgactacattgatgatttctccgtcaaacagcgatgaatatttgagcgctagacatttagctggaatttctgattttaccgctgatgtgaatggggtcaaaatacctgtttattctatcggaggaaatgacgcggtcaaatttactgatttggaattctgcggatatgatatgggccttgatgaaaaattcagatatggatttgccgtgtataacagtgataaaaaattaaatcaggacaagataaaaagtgcaagtataagcggcaatgctaaatatttgaaagcgatgagcagtaatcaaagagattttttaatttatattaataacaaaagtatgataccgtataatgttgatggtgaatattatattttaatatctgatatcaatgattctccgcacttcacatcttatgattatcaaataaacaacaccgaaatgaattataatttagatgattataaaattgaactaaaatatataccttcggcttatgatgatatgaaaataatgtgggacgattatttttatggttcggagctgggaaactgtgtcgccgaatatgagtataaaggaaataagatttatgcttatctttatgagtatgaatatacaggttccggcacaccggagaagaggtacagttatagattgattgaatttacacatgacaatataattgtggaattaactcaaattttaaattcttatatttatgaaaatatagataaggaatatttaaatgtaaataactatgataagttaacttattattttgactttgattctgtcaatggtattttaactattaaaatgtcagatggaagcaaatataacttagatttaaatacatatttaattgcgaaataataataggagtaaatgctatgaacatttgtgtttttggctccgctaaggaatttaattcctcaataatggcagaggcaaggaagcttggaagattaataggaagcatgggatacggattgacatatggcggattcggtgaagggcttttgtcagaagtagccaaaggcgtgaaggaatatggagggtatatcacagctgttgcacctcaaacgcccagacttaataatccattgtttcaggaaattgatgaattgattttgtctgatgataaaagaaaacgtaaagaactgcaggagaaaaattcagatatgtttgttgttctacctacaggaataggggtattggatgaattgtttgaaatacttgttttgaaaagctacggcgaactaaaacaaagaattgttattgtaaatattgaaaatatgtatgataatcttaaagttttgctgcaggatatggacgctatggaatattgtgattttgtagattccgttgacagaatatttatgaacgacaaatcgcagatgattaattaattatattatgtgttatataatacttatctttatctttttatgttcaagaatgtagtttttaatttaaaaacttcatattttttaaattaaaaaagtctgaatttgtgaaataaaatgttgaattttgcaaattataaagagccataacttttgttatggctcttattttctattcagtttctacccattcagtaaccagttcagtaaagaaatggccgtccaaatggtcaatttcatggcagaaagcacgggcgactaaatcctcgcctgtatactcatatacagctccgtttctatcggtagctctgatttttactattctaggccttgttactaagccgtatctgcccggatagcttaaacacccctcggcgtctgtctgttcgccttctgtatatataatttcaggattgataagctctagcacagtatcacctgtatcaacaacggcaactctttttagaacaccaacctgcggtgcggctaaaccgactccatttgcggcttttaaggtttccatcatgtcgtctaaaagacaaattattctgtcgtttatttcttttacctcacggcattttttggtaagtatttcgtctcctagtttaactatgtttcttattgccatattattttcctccgttttaactcatattaattggattgatatcaataatcatagtagtgtttttgtttttttgaatatgggtattattgatttcatggagaatttccagagataaatcagcgtccctgaccttaattaatattctgtatctgtaatcccctttaattctctgaataggcgcaggcataggatgagccaatttaattatattattgtggctgtcatcggaatttttaacaaattcaaaaacagaactgatttcaaattttacaatatcttctgtttttccctgaaccaatatacttattatgtcacaaaacggcggataattcaagcgttttctgaattttatttcattttcataaaaaccaatatagtcatgggttttagcaaactcaattgtagaattctttggctggtatgtctgcacgactgctcggcccgggatatctcctctgccggcacgcccgcaaacttgtgtgagaagagaaaaagtcctttcatttgctctgaagtcatcaactccaagagaggagtctgcggcaagtactccaaccagggtgacatcagaaaaatctaatcctttagttaccatctgtgtgccaagcaaaatatctgcttctccatttttaaatttatttaatatcgcttcatgacttcctttagctgaagtggtgtcacggtccattcttaaaatttttgcctccgggaaaagccgcttcagttcgtcttcaattttttgggttccagtgccaaaaaatttaatatgctttgagccgcattcaggacatacggaaacattcctgatagaatatccgcagtagtgacaaactaaactgtcgctgttcatatgataggtaagaggaatactgcagtttttgcattccattacatatccgcactgtctgcatgaaacaaaggtgttataaccgcgtctgttcagaaaaagtatagtcttttcatttttttcaagatttttacgaatttcaaactccagtctattgcttatcggagacatattatggtaattaaatatttcacttctcatatcaacaatttcaacagacggcagggagttgtcattatatctgttattcatttcaaacagcttgtaatctccaagtgtttttgcatgataaaaactatcgacagaaggggtagcggaagccaaaatcaaaggagctccgtttgccgaagctctgtattcagcaacctcccgtgcatggtatctcggattgatttcagatttatagctgttttcatgttcctcatcaagaattatcattccgatattttcaagaggagcaaatattgcgcttctagcgccgacaacaacgtctacttcattattttttattttgttccattggtcaaatctttctccatacgataatccactgtgtattacagcgactcgtttcccgaaacggctgacgaatctttcaaccatttgaggagtcaaagagatttcaggcacaagcattattgctctttttccatcttcaatacattttcgtattgtttgaagaaaaatttctgttttgccgcttccggtgacgcctctgataagtatcttttcgtgtttgttctcgtctagaagattatctatataatctattataggtttttgttcatcagtgggttcgtattcatttgttacaatataatcagactcgtcatatacttcacgtacctttttttcactgtatatttcaacaaaccctttttcgcttaatgctgcgagagagctgtagttcccgtcagacaatgctattaactccgaagtcgtcagtttttcactgtccgctaaagccaaaagcatattgccttgaacatgcgcatgttttttaaaaagctcatccgcagccgcataagcttcatcagatgatattttaagcttgactattcttattgtaagttctcttattgaatcgcttattttttcagatatagatataacttttttgtctgccaaagaattaagagaccggtgataagcgggggaagaaacaagttcaccaaggtggtcatattccataatcccatcattttgaactagtatatcaactattttcttttgaaattctgatataccggatgtatcagagttttggagacttacccacctgcgtatcacagttttcattttcggcggcactataagcttaaatgcgctgtaaaacggacacaaatacctattttgcatccacacgcagagactaagaagttccttagagcaaaccggcttagtatcaactactgattttattctttttagcctggtaaattggctgctttgcgagataccgacgataagtccttcaacggaattattatatagaccaaacggcaccaggacgcggataccgacttttacagcgtcttctaattcttttggaacaatatagtcaaaagaacggtcgattatatgtttagggcttattaatgcaacctgtactatcatatgccttaccaccaaactattctataatatttgtttgcttttattaattgataaagctttgttaagaattatatttgacagctcaaatttatccattagaggaagttcgcttatatttccatctctatcaattaacgccgccacattagtgtcagtaccaaacccggcgcctgtagtttttaaattatttgcgactatgaagtcaacgtttttatttacgcatttttcagaagcatttttgattaagtcctcggtttccatagcaaatccgacaatcgtttttttatcactgaattttttaccaagttcctttaaaatatccggatttttggataaagctatactcatatcatttagattttttttctttatcttattttctgatacggcagacggtttaaagtctgccacagctgcggccattattattatatctgcactttctgactcattgattatactactcctcatttcatcggcagaggaaacgtcaatagttttgattccagtgataggttcacatgaattatgtccggcaaccagtgtaacttgtccgcctcttagcattgcggctctggcaagagcaaaacccatttttccggtcgagtgatttgttataaatcttacagggtcaattttttcctgagttgcgccggcgctgataacaatctttttgccggttaggtctgcggaatctaaaagcgctaattttgcgatgttttcaaatataacgtcaattccggctaattttccgtttccggtatcgccgcatgccaggcgcccgctttcgggcataacaaaatgatagccatgatacttttcactcaatttttttatattgtcctgcacaattggattttcaaacatatttgtattcatagcaggagctatgagcacaggagcttttgttgccataaccgtagtcgtcagcatatcatcagcgatacctccggcgatttttccgatgatgtttgcagtacacggaactatagcaaaaacatcggcggcttttgccagggatatgtgtcttatttcccatgattttggctcgtcaaatgtatcaattgccaccggattgcctgaaagggactgaaagctcagcggagctacaaattctacagctgattttgtcattataactttgacttgggcgccggactttacaagctttgaagtaagctcaagggctttgtatgccgcaattccaccggtaacacccaatacaacagttttgttatcaagaagcataaatatcacctacataaaataatttataaaaatcaagcccactcggactgccagtgctggttcagccggtgggcggttattcaaataacgtcagtttaaagacttccgatatccggcgttgggatatagttgagcttatcctcataaatttcttcagccgctatagatacctctttgtttgacggaatatcaaccataggctgttttccctctgtcagctgtcttgcgcgtttagcggtttcaatagtcagcaagtatctgctgccggttttttcaaccatttcagtaataggcggttttatcatcataattaatctctccttttatttaatatacttaatatttcatctgatgcgtcttctacaattttatttactacaacataatcatatttatctttttttgtaagctcccattttgcagcatttatccggtcttcaatttcctcaggagtttctgtattcctaccggtcagccgttcgcgaagtacatctatattttcgggagcaataaaaatatatacggctgacggatatttctcttgaagattcaatgcgccctgaacatcaatttccaaaagcacatcttttccttcatccaatttttcattaacatatttaacaggagtgccgtagtagttatcgttatagactgcccactccatgaattcgttattatcaatcatcctcttaaattcatcaacagatttaaaaaagtaagtttcaccctcaatatcgccgtttctaggagctcttgtggtagcagatattgacggaacaatgtctgaattatcagctaacagtttttttagcactgttcctttaccaacaccggatgggcctgaaacaacgattaaaagacctcttttattcatcgtcatcaccgccgtcttcaatgttttcatcaccggatttcggttctgcccttccggcgatagtttctgtttgtatagccgataggataatgtggtcgctgtcagtaacaataactgacctagtgcgtcttccgcaggttgcgtcaatcaccataccgcgttcttttgcttcctgaataattctttttatcggcgcggaatcagggcttacaattgctataacccttgagcctgatacaatgtttccaaatccaacatttataagtttcatattagcctcgcttttattcaatattttgtatctgttctcttatcttttcaattaatgatttcatttctacaacaatttttgataagtctatatcattgcattttgaaccaatagtgttggtttctctgttcatttcctgaactataaagtcaagtttctttcctattggttctgatgaattaagagcgtttttaaattctttgatatggcttttaagtctgacagtttcttcatcaacggcaactttatcagaaaaaattgcgacctcggttaaaattctgctgtcatctgctccgctttccagctcagataatgcgtcgcgcagtcttttttcaagtctttctttatatttagttatagtttcaggagaaagtttttcaactttttcaacttctgacgacagaatatttaaatgttctaaaatgctgttgttgagcctgcttccctcgttaatacgcatgttcaagaaatcttcaagagcagcgtccagcgcggtatttatcatatttaaaattgcttcttcatcaatttctttatattgaacttcaaatatatcagaaagcgagcacatggatgacattgaaatatcatctttaacaccaaagccggataattcacgcaaattatttatgtatgattctgctagaggaagatttattttaacctctttactgtcatcattgattttatttatggaaacatagacttctattttacctcttgaaatattctgagataattttgcacgtatgttttcttcaagaaaactataaattctcggagtttttatagtataatcagcatatctgtggttgacggacttaatttggattttaacttcatataaatcgtcaaatgtcatttcggctcttccaaaaccggtcatactttttatcataattctacctcataacaaattatttttacagcttgatttattaacaagaatatagtataatctaaataaataaaaattatcttgtatattacagtataaattatcattattttgcttatctatcttttaattataccatattttttattgattgccaatagttaagaagtgttgtaacaaaaatgtaatataaaaataatatatatgtaattatagtgtaattaaattgttaatatattattcggattaaattggcaattcacgggaaaataaagcattgttaacaatttgttaacaattttagcaaacgcctgatatgacgttgttatagatgtattaatattcaataaattgggcagtttcttcaattatagcccctaattctattgacagattttcggaaaagcggtataatcgtcacatagtttcaaaagttaaacgcagaaatttggccgtataaatgttatttggccggtcttatttttgttgctttttgaaactgatagtcaaaatttatgcagaaaggggttgtggtttagaatagcgcatagacgtatattcgaaatttttggaggttttttgttttgagttttggaaagagttttagaagaattgttgcaacactattagtattgatgacaatttctacttttataatactacctacatatgccgattacgatgagatcgatgaaccggctcaatactatggtgttgttcaagtctcaacacttaatgttagacaaagcgcatcaatggacgccggtgtaatcaccacgcttccgtatggtacaagagttagagttaattggattgaacccggctgggtttgcgttgcatataataatgatggacttattggttatgtttcagctgactatctttctgtttacgatggaacgatacctgaagcaagtgaaggcggtcaggctgtttgcgatatagcggcacagttccttggggttccatatgtttggggcggtacttcacctaacggatttgactgcagcggattggttcagtatgtatatgcacagttaggatttaaattggctcgtgtagctgacgaccaaatgaaagagggtattcctgtttcaagagaccagttaatgcctggtgatataattggattcagcagttcaggtcttggcggatatgcttctcatatcggaatatatgttggtgacggaatgatgattcacgcgccgcatacaggcgatgttgttaaatataccagtattaattctgattattatgcttcgcgtttcgctggtgcaagaagaattatttattaagtttaatattaagatgagggcgacctaataggccgtcctttttgttcatgaattatattaatataatataagtttatttaggagagtataacatgacgattgaggagttaaacagagcgattaagtcttatactataccgcgggtatttttcttttttggtgaggagacatatttgctggaaaataaaataaaatctataaaggataaaattgtccctaaagatttagtaagttttaatttttcatatttaaactcggataagatgacaccggatgaaataattgaagctgctgaaatttttcctcaggtttcggacaggcgtcttgttgttgtgaaaaacagcggtttgttttctaatctgacgacaggcaattttaaaagtattaaagaatatatattaaatcttccggaatatgtatgcttgatattttgggaggatgggtttgattctaaaaaagttaaatcactgaagtttattgaagaatgcggcggcgggatagtaaattttgaatacttgccggtaaacaaacttgaagtttgggctgagaaacagcttgaaaaagcaaacaaaaggataattgcccgggatttaagttattttgtaagaatatcaggtcagtctttgacaaagttaagcaaggatataaaaaaattgattttgtatttgggtgatgagcgtcataaggtaacaagggatgatatagacgcagtagtcacgaaatctgcagaggttcaggtttatgatatatttaataaaaacattataggcggacgcggagataaagccaaggagcaattgaaacatttaaaaactgataatgtttcacctactatggtaatgagtattattttagaccagttatatgaactgctgatgtgcaagctgttaaaacaggatggtctgacagcaggagaaatgcttgaatactttgacaggcgccctccgatttttgcagtaaataaagctattgataatggtatgagatatagtgaaagttatttgaaaaaaatggtcgataaaggtttgaaatattcaattgatatgaagtcaggcaggatgggacaatgggatgctgtcgagctttttgtatctgaattaataaaaaaagattaaagtctatgtatttaataatataaatatattggctgcgggtgaatataatggaaaatggcgttataatgcagtattttgaatggtatcttccgcctgacggaaaccattggaatagattaaagaatgatgcaaaacatctgtctgacataggaataactgccgtgtggcttcctccggcttataagggagctaacggaatatttgatgttggatacagtgtttacgatatgtatgatttaggggagtttgaccaaaaggggtcggtttccactaagtatgggactaataaggaatatattgaagctgtagatgagcttcataaatatggtattgatgtttatgcggatattgttttcaatcaaagaataggtgctgacggaacagagattgtccgggctattgaggataacccgcaaaacagagaacagcagacatcaggtattgaagaaattgaagcatggacgagattcgattttttaggaagaaataatacatattcggattttaaattggattggaagtgttttcacggcgtagattatgatgagagaacaaaaagaagttcaatatttttgtttgagggtaaacactgggacgaaaatgttgacagagaattgggtaactatgattatttgatgggggctgacaccgattttgattatcagccgcttaaacaaagtttatttgattggattgattggtatgtcgatacagcaaatattgacggttttagaattgacgcagtaaaacatataaaatttgaattttttaaggagtggctgtcttatataagaaacagtaagaaaagagaattttttgcagtaggtgaatattggagtaaggatttagccaggcttcaaaactatctcggaatttgtgagaatgctatgtctctgtttgatgttccgcttcattttaaattttttgaggcttcagccagcgacggaaatatggatatgtcaaagcttttagatggaactttagtgtcgtctgagccgacaaaagctgtaacttttgtagaaaatcatgatacccaggagggtcaggcgctccagtctgcggttttaaattggtttaaaccttcagcatatgctgtcacattgctgcgtaatgaaggttatccctgtatattttatggagattactatggtgttccatcccataatgaaaaaccattcatggatattttggataagcttttgtggttaagaaaagaaaaagcttttggttctcaaaacgactattttgacgactttgatgtggttggatggacaagggaaggcgacgacgaacatataggagccggacttgcggttttgattactgataagcggggcggtgttaagaaaatgtatataggaaaaagacatgcgggaaagattttttatgattgtataggaaattgtgctgatactgtaacaattgataaagaaggttatggtgtttttgaagtttctgacggttccgtttcggtttggatattaaaaaatgaataatatactaaaaaatctttgttaattttgttcataatatttgacaaaactcttataatgtgttattctaagtagcggtataagcggatacggtttaaaccgtttaattggaggtgagggtttggcggacgaactaaagctgattaaaaaagcgcaaaaaggtgacgttgaagcttttgagaagattattactgagtatcagtctattatatataatatagcttttagatttgccggaaatgctgaggatgcggccgatatgtcgcaggaagtttttctgaaaatgtttagaaatataaactcgtttcaatttaagtcaaagctctcaacctggatttatagagttgcaacaaacacttgcctggatcaagtgaagagaaaaaatcggaataatcctgcttattcattagatgacgggtttgaggacggcgacggaagctttttctcaaatgaaattgcagatgattctcccacacctgatgaagttattgaacaggctgaaatgaaagacgttataaaccaggcaatatcagaattgcctgatgattatagaactgttattatattaagagatatacaagggctttcctatgatgagattgcagagataattgaatgttctgttggtaccgttaaatcaaggattagcagaggaagaagaaatttaagagaaattttatctaaagacagggaactttttgataagtatttcgtctaacaaaatgtagacggatatatgtctgaatatacaatatgttggattttattaattgaatatttctgtgtatatttttgtgtattcgttcaattttactataatgtatataggaaggaggggtataatgtcagattacgaaaaggatgatgagcttcgccgtaagtacggtgaggttatggacagtattgcggacgatattcgtcagataaatgtaaacaaatctgaaaagattgttcttgacgaaaaagctgatgatatttccgaaaataccggagatattttaagcggatttgaatctgccggcggaagcgatgctattgaaaacaacgatgtgaaacatgattattctgacaataaatttttggagagtataagcagaatcgattttgacaatccagacgaagtattgcggagtattgattctggaaatgatgaatttaaaaatttatcagactttaacgaaccggattttgatgccccgcattacagtgtccctaatcttgataataatgtgtcaggagttttggagtctaatgatgaatttgatattcctgaggattatcctgatactttgagttgtgatgaatgtgtggatttattgtatgactatttgtctgactcaactgatgatgttgaaaacatgtctataaaagctcaccttagaaattgtgagatgtgcagggttgagcttgatgatataagagatatgattggcgttatgagcagttcgccgaggttgactcctccggctgacttgatatcaagtattcatagtgaactggtatctgcggctccggaagtcaagtacgaatatgaagttattaaagcaagcggagttttaggcgccggtccgattgataaattaacagcggcatttgaaacagcgcggcataaagttgaccattttataagacatgcaaattggaggattcttgctccggcggcacttagtgctgttttggttgtaggcgtggcttcaagcggcttatatcaagtaatgaagtcttctgatgaagtatatgatttttctgataatgccgctatagagagtgcaaaagctactgctaaacccagcgccagcgggcttgacgagtatgttggaggaagagcgtcagaatcttcgccaagaaccacatcggcgcccagagcgtcttctgttcccggaaattcaacttcaccgagaactacagctagaccatcagccggaagttcttcagggctgaacattggttcaagtactccgagcagcagttcttcaaataaatctacatcgtctagcacatctggcagcggaagtacaaataaaaatacgactaaaagtaattctaacagcggtagttcaaataagtcaaatacttccagctctacaaataaaaacaacacaagcagctcaagcaataaaaataatacggctgcggcaactccggctcctaaagcttatgttactccgaagataattttgccggatattacgtcagctatgacacaaggaacacgctcaggacaggataataatttagttatacctgaaaatccggcgcctgaaaagtttgaatatactcccagtgacgattcaggaagtcaggaggaagcaaatcagcctcagactcagaatgagtccaacgatacaaatattccgaatactccagccgctgtaacatcaggcggaggaggcggcggaagcgcagcggaatcaacagcaactccggaccctactgagaacccaaaacctacgcctgagcctactcccggtgcgtcggctccagtagcgacaccttctattactgcagaaccaaaactgggcagaaatagtaagggagaaactaaagcatttgcagataaatcagaaaatatggacgatgcctctgtagtgagctgtgagattaaagataaagcggtatatgacgttcttatgagttcagcgcttgctaactgttcaaagattgatgagaacggcgaggtaacattatactttactggagctgaatatattgcgtttactgacttcttaaaagccaacggcttagaatatactttagttgttcttggtaataatgatgatgtaaaagtgcttgtcacaggagtaaacgtgacagaataatatggtttataaaggaatggtcatttgtgccattccttttttattggatttttttgttaatatataatttacaaaaagtttttgtctgttaaatagatttttatatttttattgggtataattataataataaaatatattaaaattttggaggcggataaagtgggaaatattatatcttacgtaaaagaaaacggttttctaacttttgacgctatggactttaatgaggttgacagccttgttttgtcacaactttcatatctttgctttgatagctttatagaaagtgttcctaaatttgatataacatttaaggatttagcggaaaaagaaaataggaaagagttatttaaaaatattcgtactccgaaacaaaatcatagactgcttgacgcagttgcggagagtgagcggtttggaaacattggtattggaatttatgtcaatgaaatagaaaaagaaatagaaaaacaattttccgctgtaactttcaaattatcatcagagaaatattatatagcatttcgcggcacggataaaagcctgattggctggaaagaggattttaatatgtcttatcttaaaaacgttccggctcaggattccgctctctgttattttaaatctgctgctgaagagcttgacggcgtgttcatattgggcgggcattctaaagggggaaatttatccgtctatgcggcggctaatgctgatgaagacgaatttttgagaatagaaaaaatatataatcatgatgggccgggattcagagataatactttaagccaagaaaaaaggtctaaactttcggatatagttttgaaaacggtacctaaagcttctgttgttggtctcatgcttgaaagtgattcaaaatataaagtagtattcagcaagtccttagcctgcaatcagcataatccgtttacatggtcggttaaagctgatagttttgtattcataaaagaaacggatatgttttcgagattttctaaaactgctgttgataaatggcttgagaataatgatgatgaaactgtgagcggtctgattaattatgtatatgatttgattaaggcgacaggaagtgatactgtggctcagttaataaaaaattggaataaaaatataagacttatttataatgaaataaaaatttcggatccggagcttaaaaagttagcagtcaaggctctgcatgattttatagtaatttttaaggatattttaaaagggaaaagaaaatatagtgatgcgaaaacttgttctgaagtcagtatatcaagcaaataaattcaggggcgtttaattcatatttgaattagacgcttcgtttttatattaactattataatatgcttgtggttcgcagtcaatgaataaaatttatgtattaaaagttagtttatttgtgtgtatacgactttatttattgtttattataaaatatcttattattgtttttctaaaaacatactttttgtattagtttacataagcattcaatttgcatcccgttatgttacgtttatagcacaatttgttattattgcttatttttgattgaaattttagttaaaaatgtcagcgtataatatatctattttaatgctgcaaaaataattcaagaaaaactgcgtataagattgacaaaagataaatttatgtttaaaatactatatgtatgtaaaattataaaatattatgacaattctgctgaaaaggagcttttgtatgagtataaagagactgtttgtagaaaagaaaaaaggtttcgatatagaggccgaagagcttaaatctgaccttgttgaaaatttaggtctgagcggccttaccggtgttcgtgttataaaccgttatgatattgacggtatcagcgatgaagaacttcaaaaggtgcttcccagtgtttatgcggaaccgcaggtagacaatgttgaatttgaaaatatagaaataccaagcggtgataaatattttgtttcagaatacctgccgggtcagttcgaccaaagagccgacagtgcggcacaatgtactcagataatgacagaaggtgaaaaaccggttgtcagaaccgctagaattgttattttgtcaggtgatattagtgatgatgagttaaaggctgttcaggaatattgtatcaaccctgttgagtcgcgtttggcgtctatggaaaagccggataccttagccgacaaccttgaagagccggctgacgttatgattgttgacggttttatagatatgaatgataaagagcttgaacagatgattgcagatttgggtctagcaatggactatgatgatataaaattctgtcaggactattttaaaaatactgaaaaaagaaatccgagtttgacagagatacgtatgatagacacatattggtctgaccattgccgtcatactacattttctacaaaacttaataatgttaaaattaaaaatgagtttattaagtgtgtatataacgattacctggaatcaagaaagttcgtatatggtgaacgcaaaaagaatatctgtcttatggatgttgctactattgccgctaaagagttaaaaaaacgcggtatactaaccgctcttgatgagagtgaagaaataaacgcctgctcaattgaagttgaagtaaagatgactgacggtaccagtgaagactggctggttatgtttaagaatgagacgcataatcacccgactgaaattgagccgttcggcggagctgcaacctgtctcggaggcgctatccgtgacccgctgtcaggccgttcatatgtctatcaggcaatgagggttacaggtgcgggcgacccgagaaaaacattaaaagaaacaatggagggtaagcttcctcagcgcaaactggttattggagctactgagggctatagctcgtatggaaaccaaataggtcttgctacaggcggagtaaccgaaatatatgacgagggatatgttgctaagcgtatggaaatcggcgctgtaattgctgccgctccaaagaaaaatgttatacgtgaagttcctgaacctggagatgtggtgattttacttggcggaatgacaggccgtgacggctgcggaggagctaccggctcgtcaaaagcccatgacagttcgtctttagagacctgcggcgctgaagtacagaagggtaatccgccggttgagagaaagctgcagagattattcagaaagaatgaagttaccacactgataagacggtgtaatgactttggtgccggaggcgtttcggttgccattggcgagttggctgacggacttaatataaaccttgataaggtgcctaaaaaatatgagggtcttgacggaacagagcttgctatttctgagtctcaggagcgtatggctgttgttgtaagagctaaagacgctgaaaagtttattgatgaagctgataaagaaaatcttgaagctgtagtagttgctgaggttactgaatcgccccgcctggttatgaactggcgcggtgatgttatatgtgatatttcaagggagttcttgaataccaacggcgctgaaaaaaatgctgatgttgagattgcggttgataatttctcgtccgatatgtttgaatttgaaacaaagggaaatgactataaagagaagattttaaatttaatgagcgacctgaacgtatgctcgcaaaagggtcttgttgagagatttgacagcactattggaggaaactccgtgtttatgccgtatggaggaaagtatcagcttacgccgcagcagaatatggttgcaaagattccagtgctgggaaatgaaaccaatactgcaactgttatgtcttatggttataatccgaaaatatcaaaagcaaatccttttatgggcgctgtttatgcggttgtggattcggttactaaagccgtgtgtgccggtgcggattataaggatatttatttaacgttccaggagtattttgaaaaacttggaaacgatccaaagagatggggaaaacctcttgcggcgcttcttggcggttattatgcccaggagagtttgtctatggcggcaataggaggaaaggactcaatgtcgggttcttttaatgatattgacgttccgcctacactcgcgtcatttgcagttgcgccgcttgacgcttcaaaggctgtatccagtgaatttaaaaatgccggaaacttggtatttttggttaagcctaagtatgacgaaaataatctgcctgatttcgatagtttaaaacagctctatgatatgttatacatgatgatttcagacagtaaaattaatctgataaagagtgtttatgctgttggatacggcggtgttatggaagccgtttgtaagatggcgatgggaaataaactaggatttgaatttaccgagtgctgcgataaatctgaattgtttaaggctttatacggaagtgtaattattgaagttgacggattaaaggcaaacggttctttgggcagtatgcttgaaactgttaagctgggtcatacaacagacgacggcgtcataaagattgaaaatgaaagtataagtattgatgagattgtttcagcatggcagaaacctcttgaaagcgtttatccaacaaagtcaaaatatgaggatgttggaatgaaaaagtttgactgttcagagagaaatatttctgtgccggctgtaaaggttgctagaccaaaagtgtttattccggcttttccgggaacgaattgtgagtatgattccgcccgtgcttttgaaagagcaggagcggaagctgatgttcagattttcagaaatctgaagcagtcacatgttgaagaatctatcgaaagatttgtgaaatctgtcaatgaagcgcagattataatgattcccggcggtttcagcggcggagacgagcctgatggttcaggcaagtttattaaagcggcttttgaaaatgagaagttaaaagaagcggttatggagcttttgaataatagagacggattgattcttggtatttgtaacggttttcaggcgcttataaagttagggcttgttccgtttggtgagataagaaagatagacgatacctgtcctacactgacatttaatactataggcaggcatgtatctcaaattgtgtcgactagaatttcgtctgtaaaatctccgtggctgtctggagttaatttgggcgagatacaccagattgcagtatcccatggtgagggcagatttgttgccagcccggaaataatcgcggaaatggaaaagaatggtcagattgctacacagtatgttgattttaacggtgaaccgacttatgagatgccgtataatccgaacggttcttattatgctatagaaggtattacaagtcctgacggaagagtgtttggtaagatgggtcattctgagcgtatcggggaaaatgtttataaaaatataaccggtaatatagaccaaaaaatatttgaaagcggagttaaatattttaaatagtataaggagaaaaccatgtcatattatgaagcgtccgaattccttaaaacaaagactaatataagacctaaaacggcggtagttctagggtcgggtttgtcagaactgattgatatggcagaagtagatacaatcataccatattctgaaatacccgggtttcctgagttaaataatacttatcataaatgccgggctgtttttggaaaactttcaggaaaagatatattgattatgcagggaagaatccactattatgagggattttcaatgcaggaattagtttttcctatacgaatgatgaagtatctcggtatagagacggttattttgactaatgccagcggagctataaatactgattttgttcctggtgatttagttatgattgaagaccatattaaactaggttttgattctcctcttcgcggcaaaaatcccgatgagtttggagaaagattttttgatatgtcaaacgcatatacatccggtcttaaagaattggctctaagcgctgctgagaaagaaaacattaatcttaaaacaggtgtttacggatatatgaccggacctcagtttgagactcctgctgaaattagaatgctgaggatagcgggcgctgatattgttggtatgtcaacggttcctgaggttatcgccgcttgtcattgcggtatcaaagtcctgggattatcgggagtatcaaatatggcggcgggaattgagaacggcgggttcaatacagaagtaattgaaaatgccgaaccggtgtttagtgataaagttaaaaggctgattgagagaattatttgtgatataaattaggagatgatgatatggacagaattgcaagtttcagcgttgaccatagaaaaataaaaccatgcgtatatatatctagaatagacggagatataacaacatatgatatgcgtatgagaaagccgaatactggagaccttttaagcaattcagcgctgcattcactggaacatatgttcgctactcttatcagaaattcggaaatcagcggcgacgttatatattttgggcctatgggctgccaaaccggattttatctgcttattagaaacgctgataatcagcaggtcattgatataataaaagaaactttaagaaatataattatatatgacggagagatgccgggcgccagtgagatagaatgcggtaactatagaaatttagatatgaatctggcgaaagttgaagctgagaaatatttagaagctattaaagatataggcgttgacgatttggtatatgaaacctgaggagaaattataatgggaaatattttgattaaaaatattactgctgtaacaatgtcagacagctcaggagtgattgagaacgcttatattgttataaacggaaatctgatagagtatataggaaaagaaaagcctgagacagaagatttcgattatgtgatagacggagagaataaagttgttatgccgggtcttgtaaacacacatactcatttagctatgactttgcttagaagctatgctgatgacatgaatttgcaggattggctgttcaacaagatttttccgtttgaagataagctcacggcagacgatattttaaagggcagtgaaataggcgttgatgaaatgctcgccggaggaaccacttgtttcaacgatatgtatatgtttcaggctgaaacgggcagagttgcgctgaaaaagggaatacgagcagttttgagcgactgcgtgaattttgacggctacgatagaaaagttaaactaatggaagcaatggctgaagagtttaagaatgaggatttaataagcttcactttttcacctcatgctatctatacatgtagttttgacgtgcttaaaaagtgttcggattatgcgaaatctcatgatatgagtattcatactcatttggcggagacccagacggagtttgacgactgtgttaaagagcacggtatgacgccaactgaatatatggaaacaacgggtatttttgacagccctactattgcggctcattgtgtgtgtatgacggataatgatttggaaatattaaaaaaacataatgtaagcgttgtgcataacccaataagcaatttaaagcttgcttcaggagtcgctcctataactaagatgattgatatggggataaatgtggctctggggactgacggagcgtccagcaataatagtttggatatgtttgaagaaatgaaagttgctgctattttgcataagggtatcaccctagacccaactgttatgaatgcctggacagttttgaagatggttacggtaaacggcgctaaggcgctggggtttgataatttgggagttttaaaacaaggatatttggctgatatgattatacttgattttaactctcctcatcttatgccgaataataatactgtttcaaatttagtttacgcagcaaaatcaagtgacgttgagtatactattgtaaatggaaaattagtatataaccgtcaaacaaaagacagataaatattttttataaatcaggaggaattaggtatggcacaagtagcaattgttatgggaagtaattcggatttgccggtagttcagggagcgattgaccagcttaaaagctttggggttgattttgaggctcatgttatttcagcccacagaacacctcagcgtgctgaggaatttgctaaatcagcaaaagaaaacggtgttaaggttataatcgcagctgccggaaaagcggcgcacttgggcggtgtaatcgctgcttatactactttgccggttatagcgcttccaataaagtcttcgtttatggacgggcttgattcacttttatcaatggttcagatgccaacaggtattcctgtagcgactgtaggagtgaatggtgcggataatgcaggtatacttgcagttcagatgctggctgtttcagattcagcgcttgcagaaaagcttgacaagtttaaggcggatatggctaaagcggtagaggagaaggataaaaagcttcaagacgaacttttaaacaaagcataataaattattttacttaaagataaaaatctatttggaggatatgtgatgagcgaagcatataaaaatgcaggggtagatgttgaggcagggtataggtctgttgaacttatcaaagaacatgtaaagagaacaaatattccgggtgtattatccggtataggcggatttggcggtctgtttgagttgggcggcgaatataaaaatccggtattggtatcaggaaccgacggagttggaacaaaactgaaactggcttttattatggataaacatgacactgtaggtcaagattgtgtagctatgtgtgttaatgatattgtctgcggaggagcaaagcctttgtttttcctggattatattgcggtaggaaaaaatattcctgaaaaaatcgccgatattgtaaagggcgtttctgatggttgcgttgccgcaggatgtgcgttggtaggcggtgaaaccgctgaaatgccgggattttatgacccgagtgaatatgatttggccggattttctgttggtatagtcgataaagaaaaaattattgatggagaaaatattaaaccgggcgatgtaatcatcggtattcagtcttccggggttcatagcaacggctattctcttatcagaaaagtatttaatatagatgacagttctgaatgcgccgaggctttaaaagcttatgatgatgagttaggctgctctgtcggtgaagctcttctggctcctacaaaaatttatgttaagccaatgcttgcggctattgacgctgttgatgtcaaagcggtttcacatatcactggcggcggtttttatgagaatatacctagaatgttgaaagacggcactagagcaaaagtatataaggaaaagtttgaagtattgcctatattcaagaaaattcaggagatgggcggaatatcagagcatgatatgtacaatacttataatatgggtattggcatgatgtttgttgtacctgaaagtcaggccgaagaagctgttaatgctgttaatgcagcaggcgaaaaagcttttgtaatcggagaaattactgaaggcgaaaagggtgtagatatatgctgagaataggtgttttggtttcaggaggcggcacaaatctacaggcgattatcgacgcaatatcaaacggtaaaataacaaatgcggaaattgttaccgtggttggttcgagacccggaatatacgcgcttgaaagagcaaaattaaacaatataccttctattgttatttcaagaaaagcatttaattcattgcaggagcatgatactgcgatttgtgaacatatgaagtattgtgatgttgacttgattgtcatggcgggttatttgagcattgtcggtgacaagctcataaacgaatttaataataaaataataaatattcatccgtctcttatcccatcgttctgcggtccgggattttatggccttaaagttcacgaagccgcacttgaacgcggcgttaagataaccggtgctactgttcatatcgtaaatgaagtatgcgacggtggtccgatattgcttcaaaaagctgtagaggttaaacccggcgatactccggaagtgctgcagaagagagtaatggaagaagctgagtgggaaatattacctaaggctatagatttgattgcgaacggaaaaatataaattttggaggctaatctgattatgaaaattattgatttatcccaagaattaaaagaaaatacatatcccggcaggggaattattgtcggtaaatctcaggatggaaagagtgcggtttgcgcttactttataatgggcaggagcgctaacagccgtaatcgtatatttgttgaagatggaaacggaatccgtacaaaagcttttgacgaatcaaaactggaagacccgtcccttataatctatgcccctgtaagggtgctgggcaataagacaattgtcacaaacggcgaccagactgatacaatatatgaacttatgaataaacagatgacctttgaacaggcgcttagaacaagggagtttgaacctgattctccaaactatacccctaggatttcaagtgtaatgaaagtgagcgacggggattataactatgctatatccatattaaaaagtgcagacggcgacccttcttcatgtcagagatacagctttgcttattcaaatcctataaatggaatcggtcattttatccatacgtataaatgtgatggaaacccgcttccaagttttgagggagaacctaaaaaagtggaaatacctaattgcattgatgagttttcaaatatgatttgggagagccttaatgaagataacaaagtttctttatttgttagatatattgatataaaaagcggcaaaaccgagtcgaggataataaataaaaacgtataactgtatacgtgaaagattttagcaaactttgtattcaattttaggaggaagataaagtatgaaagaaatggaactaaagtatgggtgtaatcctaatcaaaagccttcgcgcgtatatatggaagacggcagtgagcttccgattacagttctgtgcggaaagccgggctatataaatcttttggacgctctaaacggatggcagcttgtaaaggaacttaaaaaggctacagggcttccggcggctacatcgtttaagcatgtgtcaccggcaggagccgcagttgggcttgagctttccgatacgcttaaaaagatttattttgttgatgatactattcaaatgactcctttggctaatgcttatgcgagggcgagaggtgcggacagaatgtcttcgtttggagattttattgcgctttctgatatttgtgataaggctaccgctcaattgatcgcaaaagaagtgtcggacggtgtaatcgctcccggatatgatgacgacgctttggaaattttgaaaggcaagaaaaaaggaaattataatataattcaaatagataaagattatattccatgcccgatcgaaaagaaacaggtttatggagttacttttgagcaaggcagaaacgagcttgacattaataaggaacttttgtcaaacgttgtcacagagaataaaaatatttcagaatcacagcttcgtgatttgatgatttcacttattactttaaaatatacacaatctaacagcgtatgttatgttaaagacggacaggcaatcggtataggcgcaggtcagcagtctagagttcactgcacaaggcttgccggaaacaaagccgacgtatggtggctgagacaggctcctcaggttttaaatttagagtttgttgacggtctgaaaagggctgatagagataatgcgattgacgtttatatttctgacgagtatatggatgttttatctgacggcgtatgggaaacccgatttaaaacaaaacctccggtatttacaaaagaagaaaagacagaatggctgaaaaagaatacagacgtttcactcggaagcgatgcgtttttcccatttggagataatatagaaagagcgcataaatcaggtgttacggctattgcacagccgggtggttctatcagagatgacaatgttatagaaacctgtaataaatatggtatggctatggcgtttacaggtatacgcttgttccaccattaatattaataaataattagttgtttagaaattgttaaaagcatttgtacaatgtattgagtgttaaaggttgtacgaaaaatatttattatctttcgaaaaaattggagcattacttatattaatgttttgtttagaagtttgttgtatataattgtttttaacagtgtattaaaaaattttgtatttagtgatttacggcatagtcaaaagcggctatgccttttattttttataaattataattaaagagtgaggtataatgatttttgaaacagaacgtttaaaacttagagaactaaatatggacgattttaaagatttggctgaaatattacaggataaaaatgttgtatatgcgtatgagcatgacttttctgacagggatgtgcatgaatggatggagcgtcagtttaacagatatttaaagtatggttttggattgtgggcagttgagttaaagggaagcggtgagatgataggacaagccggtttgaccattcagccatataatgattctgaggtgttggaaattggttacttattaaagaaaaagttttggcataaggggtatgcgacagaatcggcaatgggatgtaaagaatatgcttttgaagttttgaaagcggataaagtatattctattataaaatctgataactatccttcaatacgagttgctatgtctattgggatgagtaaagaaagtgaattttatactcagtattatggtacaaaaagtttacactatttattttatgtaagtaaaaaataaaatacatattatactgagtttatatagtaaaaatccatctgaaattatttaaataatttggtgaaaaaagccttttaattggataagtgttatgttataatattgggcaagctattaaaatgaggtgtattatgctagatataaagaaagttcaaatgtatacagacggagcatgcagcggaaacccggggccgggcggttatggaacaattctaaggtatggggaatttgagaaaaaattgtccggcggcgaggctcagaccactaataaccgtatggagcttatggctgttattgtcggtcttaaagctcttaatcaaaaatgctgtgttgatatatacagtgattccaaatattttattgacgcaattgataaaggctgggcaaaaaagtggaaaagcaacggatggatgcggaataaaaaagaaaaagctttaaatccggacctttgggaagaggttttaagtcttcttgaaaagcatgacgttactcttcattgggtcaagggtcacaacggacacccggaaaacgaggagtgcgaccgaatggcagttgaacaatctaaaaaatttagctgatacaattattttaaaagcaaataaattacggtaaatctacttttcatagattgagcgtataaaaagaaaggtaggaaagagtatgagaatttatgtggacaatgcggctactactaaaatgaatgccgcagtcgcagaggaaatgattccgtttatgacggaattttacggaaacccatccagtatttatttggagggcagggaggcaaaaagggctgttgaaaagtcgagagaacaagttgcaaaggctatttcagcggaacccaaagaaatatatttcacgggaagcggtacagaagcagataattgggctgttcgcagtgccgcgtcagcttattctaataaaggaaaacatattataacaagcagtgtggaacatcatgcggttctccatacttgtcaggacctggagaaacaaggatatgaagtgacctatttgccggttgataaatatggcagagtttctgtggaggatttaagaaattcaattagacctgatacgatactggtttcaatcatgtttgccaataacgagattgggactataatgcctgtaaaagaaataggcgctgtgtgccgtgaaaacggggtattgtttcatactgacgcggttcaggcaataggaatgtgtgaaattgatgtagaagaattaaatatagatatgctttctttgacggcgcataagtttcatgggccaaagggagcaggggctttatatgtgaggcaaggagttaaactgacgccttttattaccggaggagcacaggaacgcggcaaacgcgctgcaactgaaaatgttcccggaattgtagggctgggcaaagcgatagagctggctgcagagaatattcctgagagacagaaaaaattatcggaactcagagattattatatagaaaaggttttgaataaaataccatattcaagacttaacggtcatccaaaggacagacttccgggaaatgcaaacatcagttttcagtttattgaaggtgaaggaatgctgcttcgtcttgacatgaaagggatatcggcgtcaagcggaagcgcttgcacttctggttctttagacccgtctcatgtgcttttggctatcgggttaaaacatgaagaagctcatggttcgctcagagtttcttttgatgaaacaaacacgaaagaacaggtagattatattgttgatgaattggctgatataatagaacttctcagaaatatgtcgcctttgtatgaagattttatcaaaaataattagtcaaaggaggaaaatatatgtatagtgaaaaagttatggatcatttttcaaatcccagaaatgtgggcgagatatctgacgccaatgctgttggacaagttggaaacccaaaatgcggggatataatgaaaatatatatgaaaataaatgatgacacaaaagtgatagaggatgtaaaatttaagacattcggatgcggagcggcaatagccacttcaagcatggccactgaacttgttaaaggtaaaactattgatgaagcattggagttaactaatcaggcggttgcagacgctttagacggtttgcctcctataaaaatgcactgttctaatcttgcagaggaagcagttcatgctgctcttgcggactattatgaaagacatggaatggatacatctgaaataccgcagtgcacaggctgttgttcttcgtgcagtattgagcatgaaggcggcgaggattaagctatgtcagaaaagattgtgataggaatgtcaggcggcgttgacagcagtgtagccgcggcgcttctaaaagagcagggatatgaggttataggcttaaccatgcgcctgtgggacggagaaacagtaggtgatgtctttagagacggaacctgctgttctttgtcagcggtggaggacgctagacgagttgcatacaaattaggaatagaatatcatgttttagactttcgaaaagagtttgagaaatatgttattgactattttgtgaatgaatatcaaaatgccaggacgccaaatccttgtatagcatgcaataaatttctgaaatttgacgctatgttaaaaaaagccaaattgcttggtgcagagctgattgccacaggccactatgcaaaagtctcctatgattcttcatacggcagatatcttttgcgccattcaatggcttccgaaaaggatcagacatacgctttatattctttaaatcaggaacagttaaagtctataagaatgccgctgggagaaattgacggtaaggcccgggttcgcaaaatagcagaaaggttggatttgccgactgcttcaaaacctgacagtcaggaaatttgctttgtgcctgataatgattatgtgtcttttatagagcgcaggactgatagaaagcctgaacccggaaactttattgacgagtatggtaatgtgctcggcatacacagcggtataacccactatactataggtcagcgaaaaggacttggaatagcttttggaaagccaatgtttgtgacgaaaatcaatcctcttactaatgaaattacattgggcgaaaaaggcagtgagttttctgaaagtttgattgctgacaatttaaatttcatttcatttgaaagttttaatgagccttttgaagccttggctaaaatcagatacagtgctgttccgtcttcctgcatagtttatccttatgagaatgatatggcaagggttgtttttgataaaccgcagagagcggtaacgccgggtcaggctgttgtattttatgagaaagacagtgatatagtaattggcggcggtacaataaaagaggggtgattaaaatagattttcttagtttgagacgaagtataattgataaagagtataagaacctgaatgaaagacaaaaagaagctgtgtttacgactgagggtcctatattagtgcttgccggggcaggaagcggaaagaccactgttataatacataagattgctcatctgattaaatatggaaaagcatatatgagccagcatatcccggataatataactgagcaggaaattgaatttttggaatggtatttaaacggtgaactggacgagctcactcctgagatagagaattatctgtcagaggagccggttaagccttacaatattttggcaataacatttactaataaagctgctggagaacttaaagcaaggttggaaaaaagccttggagcggttggaaatgacgtttttgcaagcacgtttcattctatgtgcgttaggtttttgagacgtgatattgataagataggatacgaaaaggcgtttacaatatatgacagcgccgaccagcagacagttgttaaagagtgcttaaaagagcttgaaattgatgataaaaagtacccgccgagaaaagttttaagcttaatcagcggagctaaggataagctgatagacgctgatgaatatatggacggctgtcaaagcgactattatttaaaaaaggttgctgatatatacaagctgtatcagagaaagctcaagagcaacaacgctttggattttgatgatttgatagtgctgacagtaagactgtttgaagagtgtcctgaagtgcttcagtattatcagaataagtttaaatatattttggtggatgagtatcaggatactaaccatgctcagtatagactggtaagccttcttgcaaataatcataaaaatttgtgtgttgtgggagacgatgaccagagtatatataagttcagaggagccgatatacaaaatattttgggatttgagcaggaattttctaactgcaaagtgataaagcttgaggaaaattatcgttctacacagcatattttagacgctgcaaacagtgttataaaacataacgatggaagaaaaggcaaagagctttggacttcaaacggcgaaggtgaaaaaatcagcttatacattgctgacaatgaacatagcgaggcgcagtctatagtagaaaatatattaaatttaaatgcaaatttgaatgatacggttatattatacagacttaatgcgcagtcccgtattatagaggatacactattgagaaatgctattccctataaagttctagggggcttgaggttctatgatcgtaaggaaatcaaggacataagctcatatttgaggctgattgtaaataccaatgatgatattgccttaagaagggtaataaatgagccgaagagagggattggaaataccactttggaaagagtgcattcagtatcggtgcagaacgctttaagcatgtttgaagtttgtgagagagctgacgagtttgacgaattcaattcatcagcgtctgccaaacttaaaaagttttcagaacttataaataattttaagcgtgacctagatgatggcatggggcttgagctttttgttaaacttgttatgaaaggttcgggtatggttgaggcgttaagcactgaaaagacagttgaaaaccaaactagacttgaaaacttggacgagtttatttcaatggttcaggaagcggtccgtgaagatgaaacaataactttagaccagcttttagaaaatatctcactggtttcggatatagataactatgatgaggcacaggaatgtgtgacgctgatgacgcttcacagcgcaaaaggactggagtttccgaacgtgtttttaataggcatggaggagagtgtttttccgagcgcgaggtcgtttggagttctggaggaattagaggaagaacggcgtctatgctacgttgggataactagagcaaaaaagagactgtttttatcagctgcaagacaaagaactttatttggacaaacaaagtataatatgccgtcgagattccttgaagaaatccctgaagagcttgttgataagaaaatagatactccgtcatactctgcaggcagtacagagtcttcgtacaaatatgctggtgagactaaaaatacatacggcggttttggagacagcggtttcttaaagaaggcgccggagaaaacattgcaggatgaaacttcatatattgttggggataaggttaaacacagaaagttcggtattggtatagttgtatcagctcagcagatgggaaaagactgtttggtagtcgtagattttgaaagcgtcggtcagaagaagatgatggccgcttatgcaaactttgagagagtggaatagtatatgtacaatgatttttcgctgatttatgataggtttcaggagatagattatagggaatttataaatttttatatagaggtatttaaccgaaataattatgagccgcattcgattatcgatctaggatgcggctcaggagaaataacggttttgctcggcaaaaaaggctatagtgtaacaggtattgacatatcaagcgatatgctttctatagctcaaaataaggcctttgacaacggcgttgatataacgtttttaaatcaggatatgactgaatttagtgttttagataaagcggacgcagttatatcttcgcttgattgtattaattatttgccgtgtctgaatgatgtgaaagaaacttttagctgtgtttatgagagcctcaaaccaaatggaatatttatttttgacatcaactcagaatataaattaagcaatatattaggcaataatacttttgtatatcaagatgatgaagcatattgtgtttgggaatgcggttattttcctgaagacaaagttacgagttttgagctgaacttttttgtgaaagacaattcaggaaaatacgacagatactttgaatatcaggaagaaaaattgtattctttacgagagcttcaaagtatagcagaagaggcaggattcaaaaaaacagaagttttttctgacttaaattttgaaaaacctaaacaaaacagtgaaagaatcttttttgttctgcggaaatagatagtggctataataaatttagatatggagtaacttttatattataaaagttcagactgttgataaagtatgaaggtgtttgataacattggacaatgctttaaatccactcgttcgaagagtaaacaatcatctttacgtctcaagtagagcatatagtgttttataatcacattctttacttcagttatttttcaggcagcttcctcatctgagtcagctgcctttgtttgtatacttttctcaaaatcactttttctatatgctgacattctaaactatattaatttgaaatgtgtgagggaatattagagcattaggattttttcttatcttctaggttggataatcttagttttatatattagaatttaaaatatagtttttataatatgacgcgcggttgtcatatttaatatgataatatataaaaaaggatggtgtttatagtggcttttgattttaaaaaagaatataaagaattttatatgccgaaagataagcctgaaattgtgacagttccgtctgctaattatatagctgtccgcggaaagggcaatcccaacgatgaaggaggagaatataagaaggctgttggtattctgtacgctgtggcttatacaataaagatgagttataagggaacttataaaatcgacggtttttttgaatatgttgtacctccgcttgaaggtttttggtggcaggaaaatgttgaaggcattgattattcggataagagcagttttaactggattagtgtaatcagattgccggattttgtaaagaaggaggattttgattgggctgttcaggaagcgtcgcgaaaaaagaagcttgactgctcggctgcagaatatttgactataaatgagggcttatgcgtccaaattatgcacattggcgaatatgacaatgaacctgcttccgttgctgtaatggatgaatatatttctgcgaaaggttatgaaaataatttcaatgacagccgtcttcaccatgaaatatatctttctgacccaaggaaaaccgagccggcaagatggaaaacggtgattagacatccaataaagattaaatgaatttaagatactgaaataagatatttagtttataaacaagtaatgtggtttatgcaaaagacagtaacaggttaatttaagatatttcatatttgattgataagttttttaatattagcgtgttttgataacaaatttaatactactgaaaaaggcatatattcgctttagaatatatgctttttctgaaataatgtaagaaaaataaattgaatttatatgaatttataacctataatttacttatttaccgtcggcttttaaggttccacaccatataattaattcttaaatatttttaaatatgtataatctgttatataggaaatgtggactattactccgcttctttattagcggttttaatgttcttaatcgcatacataagtcttacatattgggttatttgaataactttactgcataggaaatgctgaattggatactatttatgtgtcttgaatcattcgttttatcttttacgtctactgttatatttttgtgtaatatctcagtgtatattctttattttccacgactttaatatatttatgtcagatacgattattagattcttcaacttttacaattgtttgtatgtaaatatttgctgagataattctgtaatttattttccataattatttattgaaattatttctttacaaataatttcaagagtattttttatctaaatattcttgtacctaaaagatttaataagaattataatgctgttcctttcttaggcacaaaaaagtttgatatatctgccttttcaagagaaagcagttttatctttttatcaataccgcctgcatatcctgtcaggcttccgtttgagccaactactctgtgacatggcacaataatagaaatcggattatgacctaccgctccgccgaccgcttgggcagacattttagaaagacctttttgtttggctattatatcagagatttctccataagtcatagtgtgtccgtaaggaatagtttttaaaatttcccaaaccattttccgaaatggcgttgttttaaataataacggaggtgtaaaatccggttttttgccttgaaaataattatcaagccatctctttgtttcattgaaaactgataagtctttttcttcatatttttcaggtaaagtatctccgaaattcttttgtccataaaaccataacccggttaaggcttcaccgttgctcgccagcataattccgcccagcggtgactgatatttaaaggtatatgtcattttattaaacctccgataaaatattaaatcagcagatactttattatttgcaaatgtgtatgtatcaaatattaaataaattttgatatggtacttgattttataaaaatattttgtacccaacaaaatttaatttaaacgtgtttagcatattatattatgtaagaattatttatatataattatgtatacaatgttagtgatttgtcaaatttgattttatagactaaatttgattatactaattgtaatgtcaatatttttttatgtaatcgaacttaatttataaactgctcattattttcagtcgacaaattgatagaaaccaatccgtgtggcagcatagtatcacaatctataaaaactgcactgtttatttcttcatcttcatttaaatagatagaatttataagtcctttatatccgcctaaaaatagtaaatttttacttttatctaattcatttttaattaaaatacttagattatcttttacttttttaatatcattgaccctatctattttttcttttttattatttataattctatttaagtaattaatcattctttctattttttcttttgttacgaaattggcattttctaataaatattcgactgtttccatgctatctgtatatagcttgccggttaatgttcctttatcttgatttcctttgaccatttcaacgcctacgttatcaaagaatggtttcaaaaccgtttttttattggggtcatttatatattgtattttatataaattacgcaatactatcatatcattgttgattttaatatcgtcaaccattaattttatatctttatttgttctctttgcatttggatttgttagtgcgcctttaactgatgtgccaggtatatagtactctgctttttcaggagaatatgaatcatatattccatatcgataaaatggatatattatttttaatttatcataattcaaacatttattattaatatctttaatacatttttcttctatactattatctaagtctctatagaacgctctatcactgcgcggagaaattataaggcttgattttatagtgattttatactcaacttcaatcatttttaacacctccaacttcaggcataggatataaaaacgcattaccaaaaacaatgcttttgctgtcaaatggagattctatagatttaacagcgtcacgacagttatttggaattgaaattacgctgccctctttaataaagcttatgtatcgtctctcaaaatcgctgttccagccgcctgatatttcatacggtcttcgctcagaagtaaataattgtaatgttgatttaacaaaattaatattgtcaggcagcagcatacctgtatttaaaaacatattttctgaattattgattatattgtaatctataattttattaagctgaaaaatatttaatccttgtgatgctcttttacctaatataatattttgttttaaatttacggcattgataatcattttaaaaaattcactgcactcaacactatcatctatttgaagaaaaaagttaaattcagtaataacactgcctggagaattcactgtatcaatttttaccggtgtaatataaggtacagaatataggttgctgtccagggcggctgtgtccaatttaacgctttctatagaggcgcgcagctgttgtctttcaactattttaacatatggataaagttctttattgcataatggattttttaaaattttattgagattatctttctgtaaataatgtcttttctttatatcttttcttactttttttatatccagtttttcattattatcagtattatgtaatttatctacaagatagtctactggggtgggcaggtaatcattaggcagaagattagacagcgccaaaaatatttttttgtctaaaatatctttaacaaatttgttcgctttctctgtaccatattcatctgaaaacatgtaaaccaatgctccgaatatcttttgagaatcgggcatctgagttatcccaccgatagatgtaagtaaaatcttatatgttttcaaagttaagacacctcacaatcatctatagtaacctcaatacgtccatagccgcggcttttggagttccccagacggtatactccgttattaaactgtattaattttttaatgatataattccggcatatattcacagcattttcacccaaaaggtcaaatttataaaagagtatttctccttcaaaaacaagaccgcttcttgccgctttatatgttctgggattagacaatatagtatcgccgctgctttctattgatgtttttgtgtcaatagaaaaacattcagatatattttcaggtacatccttaagatgtaaatcatttattattaacttaggcgaattgttaaatccttctattccaaacagaaattccgccttagcgtcaatattgtaacgttcttcaattctgcgtatcgtttccgcatcataattatttttagaatttttccagttattattcatttcattttctatatatgtttcatataattttgctatctttatggcgtcttgtgttttatcatcatgaaccattccccgaagagtgccttttagacttgaagccggaatatatggcaaaccttcatatgtagtggctgtatattggtcaaccccgccgatttcgaaaggaggaggtgcgcttcctatcattaagtttgattttgtttttattaaaatttttattttttctttcatttttcttcctccttgaatataccattgagttttatattcatttcattatactggtacagcagcattaatgaatcaataaaagttgaattccagctgtttttggctgcttttttaaatttatcttcatcaaaacacatatgactagatgtattttttttattttctttagtaacatttgaatctttattttgacacacctgattttttaacttaatcaattcagcagctttttcaatagaaactttatctgtatctctcaatttaaagaacatagatttttctatatttaaacgtttaaaatatatatcacttgaattattgttttttgggtcatctttattgataaatatattgagtagattactatcatagttatacagcttttcgtataaataatttatagtttctttcaataaaaatttatgagcattttctatttgacttttttcagaatcttcagatgaatgttctatactatttaaattataacgggggtctgttagcaaaattaaaagttgaatataagtttccaaacgatgttttgagttgtcatttaatactattgtatctttatatatctttttatttgcctttttatatttctttttaattttctttttgtcttcatctttatttaatacaacatatagctgctttatgattctgcttttaaataataattctttatttcttatatttgaattgtcaaggtgttttaatcttaggctgtacagcaaaatgttaatatattctaattctttctcaagtgaaattttatcattgttttcactaacatctttatcacaaattttaatacttgagagtttttccagcagtgagtataaaaaacttgtactgcaaatctgctccctcatctccttatcggaattaagtgactgaaaatcttttatatcatttttaaaggatctccaaattggattactgtttaaatccttgttgatagcttcaattttattattaatttcatcatagtccacatcaaagaaagtttggttgttaatagcaattgttgtttgtaaaaattcttgtaatgtttcggggcacacagcatttttagctttatccaattgatcatttaccgcttcaagataatatcgtataggttccctgttaaacgtaatggatacgccaatacccattgatagctttttaatatcacttttattttttatctttgttttattatcttcattttttttaataagagcattattaatggtaataaccatttgtctgcatacgtctattcccttaaaaaggtttgttactgaaacagcgaaaaagatatcgtcacctgccacataaaatggatatatccaagcggcatcattatcctgacatgtattttttgctgcgtcgagaagtccaactaaagaaatattttcttttaaaatatcactaactcttttatattcttcataatcgtttatgcttgcaaacatatttcccatcccatttaaatctgcttttatgacagcaatagggaagtggttagcttcgtatggattttttgtattattttcttcataaggataaagttcattaataccttgaacaaataattcatatttatcttttgaatcagatgaattatctgtttttttggccttttgaaaagaaaataatatatctttattactttcaattattttacttgtacattcggagattttaagttttgatttagccttttgaacatttaatatattatttttattttcatcattataatgattctctgctataaaatatgtatattttaaaaacttttgaccttgagactcactataatagttttgaaatagttgatttagatgtttaataatttcatcttcagtgataccgctgcatttaaaaataactacgccggaacattttaataatatctctttagagatttttttaaaggctttatcaacatcttcaaagaacccattagatatttttttggatgcactttttatttgtcttaatgtaccggtttctttttgcttttcttgttcatgcgaatgaatgacctcgaaaagcaaagtctgcactttatctattgagagcgctataatatactcattaaatttattaaacattttagcatatgctatatgcggaaatagtataggattatttatcatcataagaatctgatttaactgaagattaaatgttagcaaagaaactaatttagtttgttttttaattttatctttataaccgactttataatcttctaattcaacatctttaattttatcaatgttatatgtttttttatcaatttctgctagtcctttagaatgatttaatgattcataccaagaatataaattgcctttactttcatctatctctatatttaaacattcttttttttcattagccctgataacaatatcaaatttatttttacaatattctttataatcatcatttaaacagcacaaaatccgtattggtctggtagatgtttgtgttcgtggtttagtgggattatgctcagagcctatattaactccgttaaacattctaacataagatctctgagaggtttcaagagatttaatactttctacccaattttcaagattctctttagttaatgatgaacttttgcattcgattacaactgctaccgcttcaatcggtataaattttaatttgtcatatttaaaaatatatggtgtatatgtctcatcaaagatagctaaatcaacctcttttgatatatttcctcctgaatctattataaacacagattgttcgataacgaactttttaggtattatttgttcaaacatccctttccaaatctcttctctaaaattgccaatggttgtgccgtgaggagttttaaaaaatagttgattgaccaaagtcttttcgctttgaatataattttcaataatagcttttatagctttgtttttaatttctttatcttcacttttttctttactttctgtaggaatttcgctcatactaaaacactccttttatattttaaataaactcaacatctatgcgccccatgccaaatgtggtgtttccgccaatatgtaatatttgcgcggcatacagccagggaacaaataaagataaatctccatgaaaagacatacttcccattaatcctccaaaatccattttttcatttgttctgtttgaatatcgctccatattaaccaattctatatctttttttgttgtgataatctttgacgacaatttctgaatatgctctatcttttctgtatcaacccatccgccgtaacgtccggtaagagatttaatcctatatgttatatttctaataatcgaggaaaagtcaacgtctttaagcaattcattgttacgccgcattcgcagaggagttagaaacttaattgtcacactttctacattatccaatgttttatagactaaaggtatttttcgcattgccgcttgataaaatgttctattctgccaaatgactctttggtctgttttatgaacagccttatcaaatatgaatttatttctccgcactccgagacgcagaccgccttgactgtttaatgcgtcaataacatttttagcatatttggcgccgtcacctaaaaacattatatcaaaattaagaatatcatttttatagaataattttttaccaatcatcggtggaacaataatataaggatttaaaacttcttttcttttcttatccaaacgacggttgtcatataaataatgacaagcttcagtgtcgtttctaagaacgtgtccaattgcaccgcgaagcgtggagccgaggtatggcggcaatattgatttatcttgagctataattgagaagttgataggtaaatattctaaataaaattctgtattttcgatcataacacattgcttacctttcctttatagaaaatagacaaaaaatgttttattttgtattattttatcatatatttaaaagtaatacaagtgtaaataatatatttttgaaaattattatatttgcacataaaaaataataaataaaataataactgataaaaatattttattatttatgtattaaactttgattaataggaaaaatataagagaaatttaattatgtatgaatacaatataggcatctgtaacttttttattaaattgttaagactaaaaatgtataaattttttaattatagagttaagtttaaagctctttatagcaatcaactgaataaaaattaaatatatacatttttaaaatttaaaattaaaaaatatgtcgaaaaagataacataaaaaatttaaaaaattttaaaaaatgtaggtttgtcaatgatgtgttacaaaaaagattaaaagagttcaccgaaattgataaaagagttgatgtagtcaattggagctttccaattattattcacggtagttcaaaaagtcaacgggaaagtaacaaggctttttcatcttgaagcgcagattcaagatgaaattagcgggggcgagcgccctttggagccgcaggcgacctaagcgagcaagcactttttctttggtgaagcgtttctttttcttgcgagaaaaagaaatggttcaaacacctattaatatcctcataggacaaaactccatcttgataagcatgaattgcgctattaatatttattctttcctgtccaacaacttgaccttgatttgaacagtaatcctgtataggatcttgatcctcaacatttaccagcccgcttggatcaacaaagtttacgggattattaccacagtacgcataccagttcagtccgtccattaccgggtcttcctgtgtgaatcttccattcgcattatacatatatcctgcgcttactgttccgtaatctacttctgtaagtctgtccaatatgtcatatgtatatgaccctgtcagtattgtatttgttcctgctttttgtgtataatttttcctgtttccgtttacgtcataagaatagctgctgtgctcctcaaaagcttctaaataccggaaacgtgaatattcgtcaatagctgtatactgatagaactttttaccattagcttcaccgacaatgcaagcttcaggaacaaacttaacgtctatctgtactctctgaccgggatagagcatttgctcgtaaggctttggtaagaatagctgctgtgctcctcaaaagcttctaaataccggaaacgtgaatattcgtcaatagctgtatactgatagaactttttaccattagctttaccgacaatgcaagcttcaggaacaaacttaacgtctatctgtactctctgaccgggatagagcatttgctcgtaaggctttggtatgtatttggaatacggaaaactcataaattgtgttatagttatatcaccataatatcacatacacaaaggagccttccgtatatgaacactataacacaaactaggagatttaggcaagtattaattgaatattcttttaaacacggcgtgacaaaggctgccattcgctataaggtaaatcgtcagtatgtctatcgctctttttgaggccggaatagaagcaaaagacgctcaagaattaatgggacacaaagacataaaattaactcaagatatctacacgcacattagacaagaacgaaaatccgaaacagcggaaaagttaaattcattcagtttttaaagtcaattatcagtcgatattcttaaatatacgtatatagcgttgtttgttccaggttcaaatcctgtcacctcgaccatccaatatgtcatatgtatatgaccctgtcagtattgtatttgttcctgctttttgtgtataatttttcctgtttccgtttacgtcataactatatacattctgaatattcccttggctttctgttttcatatagccatagtcgtcataggtatattttatctcttcctttccttgtttggttgatataagaagattattcttgctgtatgtattgattatatcttcatctcctgtcaccttgctcgtcagaacgcttccatacgcattatacgtatttactgtttcatttccatttttgtccgtttgtttggtcggcagtccttaaaggtgcataaccgtaactacaataaattcccgatgcgtccgcttaattggaaagctccaattgactacatcaactcttttatcaatttcggtgaactcttttaatcttttttgtaacacatcattgacaaacctacaatggggtcatatacatagtagatatatattatttttaataaacaaaatattatatatcaaatttatatattgaacactgcgtgttcagatgatagttcacctaacgtggcgcataaatgcgccctgctgaagttcactgaaaaacccacttttttagttaattaaatcaatattaactcggaatatctttattcacggtagttcacaaagtcaacgggaaagttacaaggctttttcttttgtgcgtggagcgcaaaagaaattagcgggggcgagcgccccttggagccgataggcgacctaagcgagcagcactttttcttttatttgagtattcataataatgacattgtaggttatttaaaacaagtaactttttattacacacacctttcaggtgtggtcacatgtaggtttattaatacaaagtgatttgtatcacacacactttaaaaaagtgtggtcacagccctccgaagcttgctaaatcacattttttataataaatttttagaaattaatatcttcaaaacagtattttttggttaacatcggtagggtgtgcgtaagcacaccgcgttaggtgagcaaccatctcacacgaagcgtgactcttgcgagtttcttaccttgtgcaattgtcgtaataagtacatctaaatgtatctttattaccgctttttcactatttatttttcaaacatccgcttagctctcaaacaaatctctttgtcagaaaacttcatcgctgcaccgcagcaactttattagtataccatgtttgtttttacttgtcaagactgacggtacattctgaaccggaggcgctgcgggcgcctgagcagccggagccgctgtagccggacttattgttggagcttcagtagcgacaacggtacattctgaaccggaggcgctgcgggcgcctgagcagccggagccgctgtagccggacttattgttggagcttcagtagcgacaacggaagtctgaacgcactcaatagggaatttaaaggcttttacaaggtgttcgaggaataccgcagaagaatagctgctgtgctcctcaaaagcttctaaataccggaaacgtgaatattcgtcaatagctgtatactgatagaactttttaccattagcttccgccgtctttggttccgtactctgttctgtatgtataaccttttccttcgcttttggctttcggtgttttggtgttcagcttgtttcccatataatcgtatgtatattccgtctcgcttatgtccgttccctctcctgttgtttctttgacagtgtttccatacttgtctgtgtatactgcgcttactgtctttccggctccgcttccttttattgtctcggccttggacaggtctccgtctacatcgtcatatacatagttctcctcatatgtcaagctgcccgctgcgtcttttacttccattttcgtcttgcggttcttcttgtcatactgatagttatagctgtttccgtttccgtctattattttgcttattcttcctacagtatcatactcataagcggtctgtgtttggtttgtttcacagttgaacacggttgttatctttcccaagccgtcatatatatactttgttttgtttcctcttccgtcttttgttattacagaattctccaatatctgtccggctgatgaggctttcggatattcaaccgttactgttgttccgtcaggattccttgtggatatctgtctgcccaaattgtcatattccgcatatgtcacatttccccgccgtctttggttccgtactctgttctgtatgtataaccttttccttcgcttttggctttcggtgttttggtgttcagcttgtttcccatatagtcgtatgtatattctgtctcgcttatgtccgttccctctcctgttgtttctttgacagtgtttccatacttgtctgtgtatgctgcgcttactgtcttcccggctccgcttccttttatcgtttccgccttggacaggtctccgtctacatcatcatatacatagctctcttcatatgccaagcttcccgctgcgtcttttacttccattttcgtcttgcggctcttcttgtcatactgatagttatagctgtttccgtttccgtctattattttgcttattcttcctaccgtatcatactcataggccgtctgtgtttggtttgtttcacaattgaacacagttgttatctttcccaaaccgtcatatatatactttgttttgtttcctcttccgtcctttgttattacggaattctccaatatctgtccggatgatgaagctttcggatattcaaccgttactgttgttccgtcaggattccttgtggatatctgtctgcccaaattgtcatattccgcatatgtcacatttccaaatatcataactatatcgtatatatattgtacttaataaaaatatcataactatatcgtatatatattgtacttaataaaaatatcataactatgtcgtatatatattgtacttaataaaaatatcataactatatcgtatatataatgtaaatagttgttagcattgaaatactttttaaattattatatttactataagtatcttaacataaaaagaaataaaagattacatttataaatgtaactttttatttttatagtgataatatgaaaatgttgtaaataccgaattataaatattttaaattgataatggggtttagccaataatttaatgagacaaagttaatggcagaggttctcccaatattaaggacaactattttaaagtcacttttaacttaaattatgaagatgttgtgctggctccgaactcgcagtaagtaaaatggcgaatatgtgctggaatctgatacgcctgatgggttttcattaatatgctggtttgaggagttcaattttactgacaagtttgattttctccagaaaccgttaattcaagttttctatttatgccggttgttttaatgatagggatattcagctatagatgttaattataaaaaaataatttaattacaaatttcaaaatctcgccacaggaggatataaatgatttttaaattcaaacgttttattttgtgtttatttgttttgatagtttcattgttttgtgtttatccgacttatgcaagcgtaagcggtgatgctgtaaaaattaatggtgagacatataggattacatctagtaaaaatataaatgtatatatagaaagaagcaagataaattttgatgttgaaccaataattattgagaacagaacaatggtgcctctgcgctttttagcgaatgccatagggattagagataataaaattatttatgatgagaccgagcaaagcgtgatattagagtataatggcaaaacaataaaattgattgtcggagataaaaatgccttaattgatattgatgaagttgaacttgatgttccggccgttgaacttaacaacagagtattagttccccttcgttttgtctgtgagacgttcggatataatgttgattatggcgagacagaaaccagtatgaacatttttatgaaaaaaagaaacagccccactaatttgtaaaaatactaaaagcgccttgaaaccgattcaccggtttcaagggcgttttttatttaaaccggcatttgttttaatcattatatccattaaaaattattataccggaaataagtcttgactttataattattatatcataatatagacaatgcgtataattttatataattacatatgggggtaaatatggtagttggttttgctttattgtttgctgccggaatttttcagggaagctttggtttggggtataaaaattacaaaccgttttcttgggcggcattttgggggatatattgtctgctgtgtatggtgacagtaataggagttgcatggattcaggtgccgtctttgccggagtttataaaatattataaaatactgcctgtattttgcggtatgctgtggggaatttcagctgttggattttctaaagctattgataaaatcggaatgtctatggtatatggaatatctatggggatttcaacaatcgttgggtctgttatgccgatgatattaaattctgcactccctgttggaagcgatgcggttaaactgtatatcggccttattttgactgttatcggagtaattattattactgttgcaggtgtaaagcgggacggaggggcaaaaggatctgccttaggatacctgctttccattctttccggcttaggttccggagcgatgaatatagggtttaacggatctgaggttttgggatatgagttaatggctttagattattcccagttagctatttcagcggtgaaatggctgcctgtgcttgtcggcggatgtattatggggatgatttggtgtatctgtgaattatttataagaaaggaatggtataccgttaaactaaaaggctccgccgttaggtcggcaaaattgtttattgtgagtatgatatggtatgcagcattgttattatatgggctttctataataattttgggagaaaaatacagctctgttggatggattctgtttaacgctttagcattaataatttctactgcctgggggctgaaaaccggggaatggagaaatcactccaagaagctgctgtttataggatgcgctgttttaattgcggcgtggatgtttatataaaagtcaatttataataatttacgatttgataattgtttgtttaatcacaggcaattatcaattttatatataattgcgggcagtataataccgagcggattaaaacatcaaagaatatagctgtatgttattgtttatattaatttaaatatttaaatatatccggtttctttatcaatgtgacatatgtgcaggattttaatacatatgttttattatattatatggtcagtatataaacatataatattttaaaacagccgaaatacttttaaagtttaattatagttttttattttattttttcaaatgtgatatttatcattgtcttccagtctattcgtgtgttataataatattattgcatagatattttaattttatagtattaatatgaaataaatatgttgttggggcaaaattttatatatattaagttataaaataagacatgaggtgtattatgattaatgaaataaatgaactgtctttatcccaaaacggtagtttaagcgcaaaagatttacgattatttttactaaaaaattttcataataagaaatacattttatcatgcgattcgagaaagagtgtgtttgaaaatgatattgaatacattattaaactgatagaagataatacatatatgattagggatatgataaattctgttataaaatatgaagaactgaaacctgaaagcctggatattctacacaaggtcaatgcatcaatgggaactacttatctcaggctgagaaacctatgcgagctgctgatgagtaaaaatgaggctgctctttataaaaaaactaaggtaagcctggtaaaatatatgaatgagtttataaacaccgttcataataatctgcctgtaactgtgagcaagaatattcatcttagaaataatatgaggagcgaggcgctagtaagcgttgatataacgcggcttacacatatacttgttaatttgctggtaaattcaatagttcacagtcactcagaaaacggtcgggtggatattatcgtaaataatttctcaaatgaaaataccgttgctgtttctgtagtggattacggtattggagttgatatagaaaaaatcaaatcatttttaaaccgtgacaatataagtattttcggaaagaataacggattgctcagatcttataaaggttatggcttaatagtgtgtcaaaaacttgccagcagtatgaacggtaaaatattggtatcaaacataaaggaaggcggttcggtatttagtttaattctcaaaactgatataggtgaggacaaagatggagttgttcctcttcgagatgttctgagctatggaaaagatttagtggatacaagcttgattgcgttatcattatttggtgcctttaaaaatgaaactgtttatctgtcataaaaaaactgcggcaagacgatttatatagataaagatataagaaaattagttattaatacaaacgcttgaatttcggtattattcagccgatttcaggcgttttttcttaaaatattatttttatatttttcaactcagtttttttatttaataattttaaaatacctcttgacaaattatactatgcgtgatatagtatcaggtgaaaggaggtatttcaggtggatgtacaattaaagcgcggaatattagagatttgtgtgttagcgtctgtcaaaggtgaagattcatatggatacagaattataaaggatatacagccatatatggagatttctgaatctactttgtatccaatacttaagcgccttgaaagttcgggatgtcttactcattattcggttgagcataacggaagactgagaaagtattaccaaataactaaagaggggattgagcgtattaatgtatttatatatgaatggccaaatgtgacgagagcgtatgattttataaaggaggcggttaaaaatgatgaataaggatgagtttttaaatgatttgcgtcatgctttaaaggggttgccttatgaagaggtaaataagactttggattattattcggaactgattgatgacgctgttgaggacggcgccgacgagaaaacatttatcgcaggtcttgaggacgcggatacaatagcaggacggattactgacgagacgtcaatacgaaagcttgtagcccgggaggttaaggggaagcggtttagtgttcctgcgattatattgattattgtcgggtctccgatatggctttcaatcttgatagcggttgccgcgtcattactggcgctgtatgtatctgtttggtctgttgttgtatcattgttcgccgcagacgttgcgtttgctgcttcagctgttttagccgttattgctatgccttttgtgtttgccgagagtatagcaaaagctttgttttttcttggtacggcaattgcttgtgcaggtttagcgatacttggattttttgcctgtgtatggtgcgctaaaaaactaatacagttcacaatgtttatagtcagaaaaatcaagtataaatttatacgcaaggaggctgagagaatatgaagaagttaatcattacagcgtgtattttatttgtttcgggaataattattgccggcgcgtctattgcgggcggggcttttgaaccggttgacctgaaggcgcaaagcgtagagtttaacgcttcggatataactgctatggatattgattccgcccttgacagagtagaaatatcaggatacagcggtgaaaaggttagagttacttatagtgaagacttaaagcgaagctgcagtgtttcagttgaaaacggagttttgaaagttgactataaatatggttcaaagtggtatgataaccttttcagtattaatatcgcaacatatgttgtaaatatagaggttccgcaggggcagattcagaactttgatattgacgccggtaacagcgatgtaagtttggaaagtttaaacggaagtttaaagtatattggcaaaagcggcagagtaagtatggaggactgcgctttttcggatttcaaactggaaattgacagcggagatatcagtatcttaaattctacagccggtcagagcgggagcagtgctgttattacaagcggatatgggaacatatatattgataattcagtctttccaaatactcaaatcaaaaacacttatggaaatttgaagcttacagaagatagctttgaaaatctttctgttgacgctaaaagtggaaatataaggtttagcagtattaaagtttctgatacaattgaaagcaaacgcgcgtacggaaactttataatggaggacgtttcatgcagagctttaatagacgcaagcgataacggcgatgttaaatttgataatttgacctcagattatattgaccttaaatctaaaaatggaaatataagaggaaatataaatggtgctcagacggagtatataataacatccaacagcaaatacggcaataataatttgggcagcgctgtgaacagcggagataagagacttaacgccgaaactgacagcggaaatattattatagagtttgaaaaataaaccgttttatttagccggttcaaaaatatcagggtgaataaaatggcagccgctttgttaggacagaaaaaatgaaaggtttttaattttctaataaatgaatagaaaaaaataagacttcattataatgaacttacccccaaaaaggtagaccaaaaatataacaatttaaggtcagttcatattgtttgaagtcttatttttatttaatatcataattaatttgagacatttaatagattggctaacaaatttgtttagtaaatacctgttattatcttattattctaatttggtatttgtgtttgcagttttaaagattttttgccggtatgtattataaagtatccatatgctgctgttaaaattcctgcaattatatagcttattgtccaggaaaggttaaacccaatctgagcgttaagaataaagcttgtgataataaacgcgtagaacattccgggaataattgcgagaatatatggctttttgttctgtataaaataaatggcaatcatagcgaatgcaaatattgctattgtttgatttgcccaagcaaaataccgccaaagtatattgaatccgtcagcattcagttttgagaataaaagcagtgccgccacaagcacaaaaattgccagtgataccatcaatctgtttcttttttttgactggtcaatatgcagggcgtctgaaaccattagtcttaaagagcgaagcgcggtgtcacctgatgttataggaaggacaataacgcctattatcgcaatcattccgcctattctgccaagaaggctgttggcaactataccaacaacgttagtcgccggggtgtcagcgttggcaagtccaagattcataactcccattgcagccgcagcccaggtcatagcaataaaaccttcagcaatcatcatattgtaaaaagtcattctgccctctttttcattgcctattgtccttgagataagggtggcttgtgtggaatgaaatccagatactatgccgcaggctacggttacaaaaaagattggaataaaatgcagacctttgggatgtatgccgacaactccagttgaccagatttcattcagcggatagcctttaataaaaagtcccgcaaatacgcctaaagcggacaaaatcagtacagccccaaagatagggtaaactctgcctattattttgtctataggaaacagggttgcaattatgtaataaacaaatattgcaccgtaaacaatccaaataactggatttgaaaatccactgttacctttcaaaatttcggttacaaataagtcgccaggagtatagataaaaacagctccgaccaaaagcattagcatacagacaaatatgttatatacaacataaatatgcttacctaaaaattgctgaataagtgacggcatttgttttccgtcattccttacggaaatcattccgctcatatagtcatgaaacgctccccctattacacaaccgataggtatagtgatgaatgcaataggaccaaataaaattccttgaatcggacctaatataggaccggttccggcaatatttaagagttgtatcaagctgtttttccactttttcataggaacaaaatctactccgtcattcaacattactgccggagttgttctatcatcaggtttaaatattttctcgcagacctttccgtaaacagctccgccggcaataagaataattaatccggctataaaagtaatcatagtcatacctgcctttttataatatatttaaaagtttaataattttagatttattgtaattcgctttgtatcaaatttatataggccgaaagttcgtcaaagaaccgttaatataagcgttaaaatatgaaaaattcaattactgagcgtcgaaatacgtttgaatgaatactataaaataagttaaataaacatggatttaaagctttacttcatcagacaaaaattaatacctaattattatataaaatttgtcttataatgtcaattgctttatagtcaaatgtctgcttgaattttaatataaaataatgtattataatatgatatgatagtaaatcataaaaagaaggatttttgtatctaaatattattgggaaacggataagtgttattatgattaaagtatttttattgggtgattcgatagttaccgcatatggtaaagacagtgaaaattttatagggggctggggcgaccatttaggaagtttttttgatgataaatttgtttcggttatttcatgcgcggaaggcggtaaaagctccagaagttttttaaatgacggcagatttatagataatggactctttactaaagaaatgtttcctcaaggggtaggcccgtgttatgaactaataagagaaggagattttgtatttattcaattttgccataatgatgatgattctgccagacatgaaaaaagagaactaagacacacgccgctcggaacgcctgattctaatggaatttatcccacagttttgccaattggaaacacgccttattcttttgagtgcggagcgacttataagggctatttaaaattttatattgataaaataagaaagcgcggtgcagcgcctgttttgctcacacctcctccaagaggtgtttttaaagatggaaaaatcgcttcagttcccggtaatcacggagggacagacgaattcggagaatatgcctatatcagagcaattcgtcaggttggcgaaacggaagacgtcactgtgctggagttgtttgaaaggtcaaaaaactatattaacagtattggggaagagaatttcaaatacttgcagtcattaaaagacggttcaggaaacaccataggcgaatcaagatacggcaggcctaaagcctggcctcaggactataatgaaataatgcagtcaggagaattcggagagattgacaatacgcatcaaaacagatttggttcttttgtttatgcgggttttattgcagaagagataagagaaaagataccaactctggcaaagtttttgttagaagagccaagcaaaaatgttccgccgccggcagactttagattataaaaataaattaaatttgctgagtttatataatctgatacgttataattttcatatataactttggaactcatataaacggttcatatattaaaaaataaatttgcagtgattataagcatagccaaaactaaaatatgtattaagaattaagttaaaatatatacaaagtctttactggacacacaataaaaatggaaagactacaataaagcggtcagaagtgttagggccatctagcataaaatttttatatttatttttattatatacctcaacttttctatgcactttattgtttcattttcaattatttccgtatatacagtgtttataacaaacttaaccgcatataaatccggcagccatgttgaactgtttgtaaatgttaaagatccttctgtcaaatcctgcggcagtgtaaatgttattgcgctcagccatagttccctggcgcttccgtcctccgttattacaacaggagtctgagttcttgtctctgacaccactgttcccgaaccgcttgctagattcattgttattcccctgttgttgcttcccaggtaatacattgtatatgttccggctgacaagtttactccgctcacatacgggtccccttttgtgctgcttgaacccgagtttccaataaagtccttataaaccttaacgtactcattatcaattgttgtcccgtcagaactgaacaacgtttgtatgcctgtgcctgcataagaggatttcagcgtaaacgttccgctctgctcgttttgtcttccattgacaaagtcctctgcaatatatgtcacctcaccggttacaggagccggttccggcgttgggattaccgcctgtttaacgaatgctgtatacataaccactcctgacggcggtccgtttgttcccagagttaccttatcgccttggttaaagtttttctgatatattttataggtcacatcatttgacgcctgcagtatatagtcgttagctgtccatccactcagccatgacggcagattcgacactcgggtatccaaccctacatacactgtgattgcacttccagcagtgaactcggctacatcagactgaagattctttgaatcgcacgctattcttatccattcagcgcctttgagataattagatacattggtaaaagtattggctctgtcgccgtagattacatcgcctgtctgcagattgtactggattgaccagtccgcagcgttggcagcgtcttttattgtcaatgacttaatcaaatttccattaagaattggcgccgcagttggctttggcgttgccgtcggcgtcagttcgggcgacaatgtaacggttcctttcgggaacgaatcaattgttaaatcatggctgtaatactcaatattgttatatcctttcccctgataatcacctgttgcatcgctggcgctgttaggattaagaccgcgggcaatctcccagctgtcgggcataccgtcgttatcagaatcaacgatctgttttgatgacgacgatggataataagaattataatccatatgtttaatgccatatttagttatagcgtccaaaacagcactgtctgtcactgttgaaaaatcacgtccgcctgtaagtgatccggtgcctgttcttgtctcttcaataacctgcttgtcaatcttaggacgtgacgccgcatttattcccgaacctgcataagcaagcacatttgaataagccgcgtcagcgctttcgggattttgggcaactgatacgttaaccccatttacattaatcggataatgggaattagaacgatagtatgcttcgtcatatccggcgcttccaaaattgaatccgctccagttattgtttgtttgtttactcataactgaattatccggattaaccattttattgcctgttaagtaaaacttataattctcaggcgcggtcccgcttgaaatgttaataaagttatacccgccctttgtggatgggccggcttttaagtaattgtttacatagttctcatgtccgaatgttccatacgcggtctgactgccccagtcatagattacgttattaacaaaatccattgcataagttccgacaaccttgcctctgaagtttcttgacaagctatgacaaatcaagttatgatgccaggaattttcaccctttccaaacataaccccaaatccatgagcgcccttggaatgatatgatacacagtcagaaggcccgataatggtatactgaaccgtttggttcatattattggaatacaatccaaactgctcgtcatttgcccagcctatcgaacagtggtcaataatagaattagagccatttgaaccgccccaggcatcataatcaccgctgcctttttcaccaggtctagatgaaatatagcgaacgataatattatctccgcccataccaatcttgccgtttttcagggttatgcctgctcctccgggagcagtttgtcccaaaatagtgacgttgccttttacaacaacatcgctcttaagcgttattgttccgccaacgtcaaatacaacgattctgtttgatgtaccgacagcatccctaaaagagcctgagccgctgtcatttaaatttgttacatgaaccacctgtccgccacgaccgccggttgcatacataccgcctccctctgcaccagggaaagccggaagagtattagccgcgctaacctcgcttgtatcaaatactgttattaaagagactaacataaacgccgatattaccatacacacaatcttttttaacattattgttttctcctttaactttatattttatttaataccacaaacacaacttataccacaaatacaataatactattttgtactcctcctttactattatattttttctgccctcctttctaattaataattttttattttgtttctttttctttgttaaaaattaaagatgtgcattcaaaataaacgcacagcccgactatgaataaattaggtaagaaacaaatttttgtttcaagttatcaataaaaaatttaaacagctatataataggaaaataaaataaaattatagagtactgactaaaatttttaatgcagccctagggggatagatatctatccccctaattgtttccgtttaacgattatatagactgtaaaaaactttttaacgtcttttatactatcttaaccgcatacaaatccggcagccatgttgatagatttgtaaatgttaatgtaccgtttgccaggtcctgcggcagcgtaaatgttatcttgctcagctgcagctccttctctgctcctgccggagtcaatgttacagggctttctattctctccgctgttgccaccactcctgaaccgtctgacaggctcattgttattcctctgttatacgccccaataaaatatactgtatgggttccggctgacaagtttattccgttcacatatgggtctcccaaagtatttgaagcatttggatttcctataaaattcttatatccttttacatattcattatcaatcgtcgttccatttgagcagaacatatactgaacctctgttccgataaaatcatcacttattgcaaacgttcccgcctgctcattctgtctgcctttcgaaaacatattattgacatcgtaggttattcaaaacaagtaactttttattacacacacctttcaggtgtggtcacaggtgaagcgtttctttttcttgcgagaaaaagaaatggttcaaacaccctattatgtaataataaatttttttatatggggtcatatacaaagttaattataataaatatcttctttatatattgaacactgcgtgttcagatgatagctcacctaacgcgcttgctaacgcaagcctaccgatgttcactgaaaaacccgcttttttagtgtaataattaaatggttcaaacactttattatgtaataataaaattttatatgggtcattacaaagtatagttttaaagagctataagctaagttataaaaaagagtattatgaacccaaagtcaaatgtaagtatacattgactgcaaatatattatatcatattgaataggcaattttattccatgaaaaggagtaaattaacaaatgtatgtcaaataaggaaatgttatagtttttatatgtcataaatagccttacgacaaaataaaaaacaaaaaagggagccatagcggctcccataaaaaattacttctttttatcatacaacccggcgcggtcattgattaccaataacctcatcaaatcctcagttagccccagcttgccttcctcatcaccttttaaaaatcccttatctaccagcttagttattgtaggaattgcccattcaggcatgttctcatcaatataatcataggtcgctagctgtgctttgatataatctatctctttggtgttgttcaaaatatcagcgccgattgcgtcaataactttatcctgactttcgtcctttttctttaactcttcatattcgctgctcaaaagttcgtcaccgctttctaatttatattctactccaaaatagttgcagatacctttataaattcccactgcacatttatattttccgtcgtcgctggctaaaaacctgttgtcgtcataattgtctataaatgcagtctctaccagtatcgccggcatgtttgtgtgttttataaccgcaaagttcgctgactttactcccctgttgcaaagccctgtctcttttgcaagctccggctgtacacagtcagctaatcttctgcccttagagctgccggtataatagtaagtctcgcacccatatgcttttgtgtttgctgagttgcaatggatagaaacaaatatatcagcgtcccagctgttggcggcgttgtatctgcctgcaagactggcgtttaggccctccgctaccgtgtcctttaagctgtttcggctcatcttaacttcaaaaccgtttctttcaagcaaaggttttaattttaatgctatttctacagtaacatcctgctctttgagcccgtaacctacggctcctgtgtcgtttccggttgggttgtgtcccgggtcaataaaaatttttgtcatattacttcacctccttcactcttgttctgctctttgagctgttttaaaacttcgtccgcttttacagcgtttggggtgaaactattgtttttccaccaagcccaaacagacgcgccaattgtgaataataggctgaccgtctgatagatatcattatcagcgatgctaaccgcctgcttgccgctcatggccaatatttggttcagcagcgctaccagcagaacaattgtgcgcgctaccgctccagctgttactttgctcattgtttcacctcctcgtttagttcatcaatccgtttgtgcgcagactttgtggactgctccactgctgtcatgcgttccaccaggtcgttgtgcttctctacttctttttcaagcaaacttatcctgtagcttgtgagcctgtttgctgtaagaactcctgttacagaaccaaacatagttccaaacagtgccaggcccgcaacaactatttcgggtgtgataaagctcattattttgctcctttacaaatgtattggcgaatacatttatagtatagcaaatatcgcctgccatgaagtgccatgtgttttcgcttgacaaagggcttccggtagagtagaattatcgtaaattgcaaataattctgtcataggatgtgattataatggaaaaaacaccaatggcaatgcgtaaacatgttgctattttcggcgatactaatgttggaaaatccacattgtttaataaacttttaggacaggaggcggctattgtttccgatgtcagcggaacaaccaccgaccctgtgaccaaggcgatggagcttatcccttacggacctatcgcgcttattgacacggcaggtttgggggacaagtcagttcttggagaacagagagaagccaaaaccctggaaattattaaacgtactgacctaatattatatgttcaagatgtcagttgtgagaacgttttaaatccacgcccgattgacaaaaatattccgactatatttgtttttacaaaatgcgacttggcaaatgctaagatgctgaacagtgccagcgctaaatatccggattcagtgctgatttttgactataacgagaagagcatggatagtttgagaaataagatggttgaggaactgacaaagcaggaaagggacgatgagacgcttatcggaaagcttctgcctaaggacagcagtcttgttttggtctgccctatagacagcgaggctcctaagggcaggctgatacagcctcaggttcagcttatcagggattgtcttgaccacaatatgaaagcatatgtaacaaatgagattacactggcggacgctcttgaagatttaaagcgtgtagatttggttgtcacagattcacaggcgtttaagacagttgataaaattgttcctaaagaaataaaactaacatcgttttctatgcttttggcgtatcagaaaggtaatttcaggcagcttttagacggcgcgtcagcgattgacaaacttagcgctgattcaaaggtgctggtgcttgagggctgtactcacaatacttcgcatgaggatataggaaaggttaagatacccgctctgataaagaattatctaggcggtgaaacgcccgaatatgagttttacaccgggtataacctgccgggaagtttttcggattatgaccttattatccagtgcggaatgtgtatggtaaacaaaaaggaagttgtcagccgattaaaagaggcggaggaagcaagcgtcccggtgaccaactatgggattgcgctggctaagctaaacggtattttggatagggcatgtgaaatttttgcagaggaagattaatgtgttatgaaatttacaaaaagcgaagctcttgagattataaaacagaataaagaagtcttatcggaggaactcagagaaaaatccctcgccgtgtgcagggagaatttcggtaactcggtatatgtcagagggcttatagagtttactaattattgcaggaacaactgcaagtattgcggcattagagccggcaacagaaatgttcaccgttataggctcacaagagaggaaattttggattgctgccgtgtcggcgcaggtttagggtttaagacatatgttcttcagggaggagaggacccaggattttcggataatgagctttgttcaattgtttcggaaatcaagacggagtttcctgaatcggcggttactctatcagttggcgagcgttcgaaagatgtatatagggagttttttaaggccggggcggacaggtttttactgaggcatgaaacttcggttgacgagcattacagtctgctccatccgtctgatttaagtttaaaaaacagaaaaagatgcctttatgatttaaaagatatagggtttcaggttggggcagggtttatggtaggctcgccgtttcagaaagacgaatatttggctgaggacattatgtttttacaggagcttaagccgcatatggtggggataggtccgtttataccccataaggatacggaatttaaagatttccctcagggaacattaaatatgactttagtaatgctgtgtattacaagattagctctgccgaaagtgctgctgccgtctactactgcgctggggacaatttctccgaccggcagagaagacggtctgcgctgcggcgctaacgttgttatgccgaatttgtcgcctataggcgtaaggcgggattattcgttatatgacggaaagatatgtatgggcgacgaagcggctgagtgtataaaatgtttgggagctagagtggagacagtgggatgcaggctggatttttcacggggcgacagtccgttgatatagggattaaaacaaaatttcagcattatacaagaatagaatgtgcggctgatgttaaaattgatatgacgaaaaaaagacaaaaataaaaaacacctctgcggtgtttttatttttataaaattatgtttgccaaagcctcgcagtgtttataaaagcttcgcaaaacaccggctttgtgaaactttaaattcaagactaaaccgctctgtcaaccttgcctgatcttatgcatctggtacaagcgtaaacttttttaggagtaccatcgacaatagctctgacacgtctaacgtttggtttccaaaccttatttgatctacggtgtgagtgagatactttgataccaaagctaacgccctttccgcaaatttcgcactttgccatatatatacacctccttaatagtttaaaaattaactcaactcgaaatattataacagaaactattttataatgcaagtactttttcaaaaaattttacattttatttatatatttttatatttattactttaaaactctgcctgtgagttcttataattctgcaaaatatcttatgtattaaactttagtaagctgatgacgctatgttatcagcttttattatttaaagttatattgatttacttaatataaacaatgtttataaagttataaagcaaattatttagctgttattttaaacagataaagcgaaaatgttatttttactaaataataaaaatattttaattatatattgtgcaaaacgctaaagtgtgctataataccagtaaggggtttcaggtaaattttaccaataataaagggggagtatttatgaaaagaaaagtggcagtaattattttgtgcgtcgtttttttggttggaacattttacgtttttgccagtgacgcactgattaatcaagaggataaaacagatgttttggaaattgcagaaaccgctgaacctgctgaacctgaatccacaacggaaatagtgatcgaaacatctcctgagccggattcggaaattgctgaaccgactgcttctgcggctgcggaggaagaggatttgagcggtcaggccggagagaatgaaactgagacaacagcgtcacagtatccatcaaatttttatgagttagctcaggttttaaataatagagatataaacactgcaggcgtttgcgatattttaacaagttatttatatctgcgggacgtatacggtctcagtaatcaggagcttgaatacatcgcaggactgattatcggcggcgctgaacctagcaatattatggaagccgcatatttttggctggatacctgcgaggatatatcaattattgaacagatatacaataagaaaagtgaatatgaaggcggtaagttttgggttgaaaacgcttacaacgacgtgactgaatatatacatggcgagctgtctgtggacgacgttaattattatcttgaggcgggtgcagccgctgttgatatacagaatgctaatgttttgagcagaaggggagtttataccattcagcagatactggacagaatcatcggcggcgaaacaatagtagatgttatgaatgacgtttatgggactaatataactcagcctgtcagtttatttgggcttaatgaaaatgaggaagcggatgaaaatattttagacagtaaagaattggccgggcttgaaaataagcagattgaggaatctgccgaagaaatattgtctgacagcggcgtttcggaaagactttctaagaaaagaaatgagaaaaacgcagggcttgtagaacagcttgtaattaacggaatcatctcgggtagaattgatgaggatttgggggtgatttttgatgagtaagctgaaatattttttgtttatttctgtactgattgtaagctgctttagcatttcgtgttatgcttcaacatccgattcgctttatgagcagtctttggttgaaagcatgatagctcaaactggttcgaattattaaagtccgtttatagccacgggcggcaatgtggaattaagcgacggaaatgtcaacgtaaatgaggttgatttgagcctgccggggaaaaatggtatggacgttaatatcaggcgtattcattatgttaacggcaaaccgggcagctactacggagtaagcactagtggaagtgtggcaacaagtccgatgtatttatataattacgttttaaacggagtttcaaaaaccgcatatgtggcctttaataaggaagaaaatttaacagatgagttttatacaacatcttcattgctgagttcaaatatgagcactgatactcatggaacaaaatactacgaatattccagtataaaaagtgtttctggaatattaatgactagggataagaataaaccttcggttcaaaattatcagctgtcgaatgaagtgtttgcgtatatgggcaaaagttccgatgttgaaattggttatggctggtatgtcgcgatgccgcagataagccaagtaaatgtttcggggagcagttatataaaaagatatacctatctgtttgaggatgaaaacggacagacgatgaattttacatatgagtttgaccttgagggaacaaagtgggtgtttgacccggaaagctgcaatgtgtcggcgcctgacagccagtacaatgctcaagtttacagcgataatcagacgcatgctttgggatttcaatacgatgttgttataacagatggagacggaaagtcatattactttttaaaggggataaataaaaattgtcttcctgccgccattatagacaggtacggaaacactgtccgctatgccgcaaacagcagcggtgttgctgtgacagatactttcggcagaaacattcaggtatcgtcatcaggtataaccgttaccaaaggcagttctgtcaaaagcgttgagtatcggatgttaaggtcaaatgacacaaccagggatccatcggggctgctcagctgtttttcaaaatattctttgcaggtgagaaaatataatggctcgggatatgagactacagaatatgtgtcacacaaaagctcaattcaatttataagcaaagaggtttactattatgataaaatcgaaaagataatatatccgacaaacgcttcggtggaatatgagtatgagacaacgccgacagtgaaaaagttctcttcaagcacaggacggtataaaatttcacataaggattatcatattaaaaaagaaattgcttatgaagacgggtcagaaaagtattcaaaaacatacagcttctatcagtacatacaaaatgccgctatggtgccgggtgataaggagcgctatgtgacggttaatgaaacttatgacgacggttcaagtaagagcatgaattataactatgattatgccggaagactatatgagataaaaggaagtattgacggaaaggtgtataacgagcagtatacatattccagtaattccaataaagatttgagcagtcttggttcatcaacgatgcttgcactgagaaaagcgaatatgcaaagcgttataactacctatggcgggaatatcataaatgttacatataataactataataatagaaatcagccgacatattcacttaatggtgagaaagaaacaacttatacttatgacgacagcttcgggcttctgctgacaaagaattataaaaaggatgacagtacgcccataagtatacaaaacagtaaaacctcagacggaaagagtatagcaagctctaaaatttatgaaaataatgcagagaagtcaacgacttcatatacatataacagtgacggtacaatagcaagtcagacagtaactccgtcagtgggggctcaggtgacaaccgtatatagctatacatacaatccggacggctcatatagattaacagcaactgtcaataatgtgtctgatactgacgggaataattcgtcggtgactactgttcagaattatgactggctgggaaatctagtatccgcaaccgaccctaacggaaatactttctcatatcagtatgacggtttggggcgtttagtaaagcagataaaccctgacggaacataccagacagctagctataatatagcagacaacagcgtaacggtaacggacgagaatgggaatataacaactcaggactatactcctcttggatatttggataaaatatatttggataataatcagaataatatagccgccaaatatacatatgacaatcacggaagaaagacgagcgagactgcataccaaagcataggcggaaaaaaggtaactgaaaattatacgtatgaccagtttgacagagtggtatcacaaacaagcaaagaggataatactgcgctggatacagtgggatatgagtatagttatggagacggtttttcaaaaagtgaatctaatattacaataacggttccgtcaagcgcaaaaaaacttttggcggtatttcataacacatcggtatcagcaagttcagcagtcagtgttaaaaacggaagcactgtatactttgccggctcggtttcggcaaaaggagcgcgctcggtattggtggatgtgtcaaatctgtcaactgtatcgcttaataaaatgtacggaaaaatatattataaatatttgactgacgatgatttatcaaagaatataacactgctgggaggagccagccaaacggtaaaggccacatacacaggagacagcacatatgtaaagccgacagttgagacagtgctggacggtttgggcaataaggcgtctgagacgtactataagcatggaacgagtacggtactgaataaaaacacatataagtatgactatatgggaaacgtcctggagacaaaaggcggcagaacctatactgaaaacctgggagactatacgtcgaaagcggaatatgattatatgggaaatccgacaaaaacctacagaaccgacggaagctatatgaccgctgcatatgacggatacggaaatgtattgagccaaactgactatatgggaaacacaaccacaatggaatacgacaggctgggaagagcgataaaggcagcggcgccgtttaatggttcagaaaagagcaaaaccctgacatactatgacggaaacggaaatgttgtaaagaccaaacagcagaacaatgagcccgggaaagcggagagttatgcggtaacggagtatgaatatgatagcagaaacagattggtgacggtaaaacagaatgacggaaccagggatatatatactcaatatgcgtacgacaatgcaggaaatatggtgaagacagtaacaggacagacaagcaaaatagctgatctgtacgggacactgccgggtgcagcggccagccaaacatatgagtatgacagattcggaaacgtgataaaggcaaccgacggactgggaaaaagcagtacggcagcgtataatctaatgggactgccggtgacagagacagacagaaacggaaacgtaaagacaatgacctacaacgcgtacggaagtccgctgacggtgagcgtaacaaatggagagacaataacaaatacatacagcaaaaacaatctgctgataagcgccaaacagggaagcagcatggtgtcgtacacgtatgacgactatggatatgtaaagacggagaacagcaacggtatagtaaacacatacacaaacgatgtagaagaaaatagaaggaactatacccaaaaagagggaacaaatacatatattaatgcgtcatatacatatgacaaactaagcagaatgacgaatgtaaattttggaaacgggataagcgcgggatatacatataacgcaaataatcaggtaacaagcgaaaactgtggagtgattgaaacaacttatggatataacaaagcgggtctaaacacatcagtgtataatacctggggaggagaaaataaagattatgtatacagttacaatttagcaggcaaccaggtaaaaaaatatgaaataaatacagatgaagaaataacaacaacatatacatatgataatttgggacaactgttgaccgagacgtcacctaattactacgcagcatatatgtatgatacgagaggaaatatagaagaaaagaaagaaggagacaactacccgacatattatagatacgataaaaacaataggttagtatattcatataatgaatatgaagcgtggaactatatagatatagcatattcgtatgacggaaacggaaatatgacggaaaagagctggatagattattatgatgacggagatggatatacaaacgaacataaaagatggttggagaaatttgaatataatggctataatcaaatggtgaaatatgaagacacaggagaaggagaagtaaatgcggaatataaatatgacgcaataggaagacgcgcaagtaaaaaagtagatggttatacgacaacgcatcgttgggatggaagcagcatagtaggagacagcggaacaggagcaggaacgtattacagaggaatgaacttaataggacaaaacagaaataatacggtaaattactatgtgaatgatggacacggaaatataaccgcactgacgaatgctgatggaacaacagcaggcaaacgggattatagcgcatatggaaatatgacaacattaggaggagaaatgaacacagtgtttaattactgtggagagtatcaagattcagagagcgggatgatatatttaagaaacagatattatagtatatcaatgtgccgcttcacgcaggaagacccggcaaaagacggactaaattggtacgcatactgcggtaataatcctgtgaactttgttgatccttgaggattaatgattagcgatatattaaactcaaaaaatatttctgaacattattctgatgattatgtgcaatttgctgaaagagtattcacagagtctataatgaaaactgtaactactactaatccaataacaatagttgaaaattctagcagtataataatatatgcatatatatatgtctcaggaccagaagctgatactataattcctggtacgcaaaatgaaaatggaactggcggcattacatatagggaagctacggttaatggaataaaaaaatattggagtggtgaatatgatggaaaaaaagttaaggttattaattgtagatttaaatgatggaaatactcgagatttaaaaattgggcaaaaaagtttaagtgtaacagtaaatagtggaaaaaggaatatcaaatttaactgattggtattcatatgctgatccaggacaaatcaatatgtttcaaggtgataatagaaatggagtaacatattcattagatgattttgaaagaactattgcacatgaatttggtcacgcattaggaatagctgatttgtatgacgatataggtattccgctaatgtttccgtcaataatgaataaccagtgggaggtaaatggagcacaatcggtagattatgctatgatgtttaatgcgtatcgtttaggtgtgtttcaaaggtggagtgaaaataaaagattattagatagaatggggattacttattataaaaagtcttaatctttaaaggagaaaaaatgaaaaataatattgtaaaaattatggttttaatgattgcattaattttatttatgacattaacatatgccagtaatgaacttatagcaaaagtagagcaatataaaataatagtaaatggagaagaaaaaatttttaatatgccaatagtaacaataaatgataggacatatataccgctaagagagacagcagaaactttagatatggatgttagatgggacgatgagaaacaagaaattaatataaataatatgattgaagaggatgaactatatgtattttataaaaacgggttatatggatatatagataaagacttcaatataattatacaacctaaatattattatgcagaagattttagtgaaggtttggctttggtgagaacaagtaattcgcaaaatggacaatatagatatataaataagaaaggggaaatagtgataccagaggcttattcaatggcatatagtttccatgatggaatagcgttggtagatttgggagaagcagctataactgatgatagtttgtttacatatatagataaacaaggaaatagaataacagataaagaatttggactggcaagtagtttttcggaaaaatatgcagttgttttaaaggagggatacggtttcccagtaccaccaagcatgaaagtgaaaaacaaatggtcatatattaacaccttaggagaatatccaacagagcaagtatatgaagaggcgagagatttttccaatggttatgcagcagtaaaaaataatggaaaatggggactgattaatacaaagtttaagttagttatagattatatatatgatgatattcacaaagtttaaatgaaggaataatgccggtaaaattaggaaataaatggggttgtgtagatataaacaataatgtgatagttgagtgtaagtatgacagaattgattcatattcagagggattagcctgctttttgaaaaatgataaatgtggatatcttgatacaaatggaaatgaagttatatcagcagaatttgaaaatgcaggtaatttttcagaaggaatagcaacagtaaaaacaaacggtaaatggggatgtatagataagaaaggggaatttgtaatacaaccccaatattttattttaggtgactgtaaaaatggtcttatggaagtatatgacgaatcttatttgataaaaggctatataaataaggatggcaaggaggtaattttataagtataataatacttaaataacatgagggcacaatgttttgtgccctcaataacaagttcggttaagataagcgtacgcataaaaaactgaaacggagtaaaaaacaccggaaagtttttgtatatataaaaataattaactatttaaaatataatccatcaaacacttccattttgaatggttgagaacacatataactccgtttcagttttttatgcatatatagaaatatatttagaaagtataatacaattttatgagtttatctaaacaataaagaaagatttctataaggctattatttaactacagaagaagtagggttagaagtcaaatacaatatggcgattatcctgatatattaaataaatatgttccgggttggaaatatgaatgagaggagaaaaaatatgaaatataaaaaagtgttttatagtgttatttttatatgtgtaatatcatttatagtgaacgtaaatgttagaggaaacgaaagcagtaacagcggtaatatagatgaaatagacagtagatatgaaataataaatttaactgaaccgataatagacgcaaaagattattggctttatgattgtgataataatggcgtttggataggtgtatataatcataaagatgattgtgtatatgattactttataggatatgatggaaataattatggaatacctactttgtttcatgatggcgttgcaaaagtgagacaaaacgataaatttggatatataaatacaaattatgagtggattttgcctcctgtttatgatagttatagaattagtgagtttgcagatggatatggtgccgcaacaaaagatggtacatacaacagtaaatatatagttgacaataatggcaatataaaacatttcttatgtcctgatagggagcaacagtttatcggagataaagagatagggactcaatatattgttgataaaaatcaaaaagtaaatataattcatacagaggatatggtaaaagatttaaatccggatgattataacagatattggggatatgagcagtttgggggaactacgctttatcaagtaaatattgctgagactgaagattctccaactataaataaagtatattatatgtttggagatgatggtctattaaaatataaatatgaagtaagcttgctcgaaaacaatcctgatatatactccggttattataatccaataatactgaataatgggaatgttatatttcttgataaagataaagaaaataaaaattatacgaaacatatacacatttctagatttggcaatgtaattggagaaaaaagtttaaaatatccaatagttaattttgaaaaccaacttttatacagttacggagaaaacatgctggaataccatggagagtttttaggaatggattttaaaccgttagtttcattaaatcaagaatataatggatacagtcttttaaatacggaagcatatttgccgtcatcggagattaaagataaaatatgggaagataaagaaagagatataatagtatattttttaggcaaaaagcatgaggaaccaaattataataaatctgcagatatatatcaactattggttgtatatacaaatgaaacagaaataaatcacaaacctgttgtagttgatgaaggaaggataccaatatacgagaaacctgaaaaaataacaacatatttaaacaatgaacaacttaactttgatatcctgccgataacagaaaacgatagaacattagtaccaatgagagcaatattcgaagcattgggagcagaagtagaatgggaaaatgaaacccaaacggcaacagcaacctgaaacggagttatatgtatttcttaactatttaaaaaggaagtatttaatggatttttattttaaatagttaattatttttatataagcaaaactttccggtgtttttactccgtttcagttttttatgcgtacgcttgtccaactttttggagttaccggagggcgtaaatcattacgccctccacaacaattttagtttgaataaatgtctaccctttgtaattcttcattccattccacctgacagccaaatgcttctgatattgctcttaatggtaccaatgtcctgctgtcttctactaaccttgctggaacatccaattctatttcttctccatttttttgcatcttattgctgtcaattgtcactgatactgttattccattctttgttgctgttgccgtttgtatatgggaaacaagctgaacaccaaaacaccgaaagccaaaagcgaaggaaaaggttatacatacagaacagagtacggaaccaaagacggcgggacgtatgtgacaacaacggatatagagaataattctaccagagtggaaaagaacatgctgggtcaggaagtaaagacaatagatccaaagaaaaatgagagttcggcaaagtatgacgacttatgtaatctgcctcgttaggcgcgcagtagcaaattttatttatattaaataattaattctaattagttcctaaattacagatggttttatttttacaaatatatactcatataaaaaatattttctgcaagcattggcagcgaagtatctttaggactgctgtcaaccattatttcaaaagtatcatccatatctaacgcatataaaccaatagattttaaaggttccttgccgctcgtttcaaaccgtattgcctgatacgtacagccaaaactattcttaagactaatacttcccatcaagccaacataatcataagaataaatattctcatcagtttcatctgaaaatttatacccggaagccgaaaaacctatagttggatccatataagaaatatactcatatccatcattggcccaatcgcttccccagctgtttcttactatccaagccccattctcataattataatcttttccgtcataagatgaaggtttagttttaaagtttgtgtatgaataattatcatcccagcctatcagcgttactgcgtgattagtaggcgtattaaatttatattttatagaaccgtcattttgataaaagctaactttgttattatcaggagctgttccattaagcaaatcactccagcttccgcaataagctccggttttcgaattataatatccgtcatggctttcattagaaagataggacactgccaccgcgccgtatttcataatcccggcttttatcgcgtttataaccgattcatttttatgatacttaatattctttatagaaccgtcttcataactataatctagaacagaactgccctcgtataaatttgtaatactctcctgcgaaataagctttccggctctgtcgatacccaaaagagatgaataatctgttctgtccccggtatactttgaatatttactattatcaaaatcctttaataatacagaacctccgccggtctccctcgacatatacgcaaccgccatagcagtattaccgccggttttgttatcccatgtaaaagttttatatccctcatcattggtataattcattgcagccgccatgtggtattctgaaagtatttcattatcattcttatagctcttgttgttaagaacaacattagaatattcctgggcagcagtatttgcaaacgcccagcagtcaccgtcaatattttggtcccttaccgcagggaagtctttcttgtcttttcctgcatccgtttcagtattatacttttcaggcataacctcttcaagataagcagaagattcgctttttccaaattccacaggctcaggaatgactgtataagccgatggatttttaaggtaatcctgatatgcgccggtctgttcagctacaatcccgccgctgtaaataacatcagcaccgattgactcagcatatccggatccagttatcacaatagcaaaaacgagcagtaatacgatactttttaactttttcataattacacctctgacagaaatttaatttactttaattaaataaccctccaacctatttcttatgttataaaattataaagcattttatcattataccatgatattcataaaattacaatataagacataaaaaatattatagcatgttatggtattttgaggacgacgttaattaatatggcgttaactaatataataagcaaaatttaaaattctgtaggtttgtcaatgatgtgttacaaaaaagattaaaagagttcaccgaaattgataaaagagttgatgtagtcaattggagctttccaatttcggtaggtgtgaccccacctttggtgggtgtgatacaaagtgacttattttactatagccttcaacgtcaataatatgaatactcaaacgcggcatagccgccgcgtgaggtgagctatcatctgaacacgcagtgttcaatatacaaaccaaattaattcattttctaggaggatataaaatgcgtaaagaagcaggttttgaaaacagagaccgttttgttgaactggggttgatgatttcagctttaagaaaggctaaaggttatactcaacatgaacttgctgagaaagcacatattagccgttcacatttaagttctattgaagcccctaatataacttcttcattttctttagaagttttctttaatattgccgatattttggaggttaaacccggcgacttgcttaatcttaatttgccttctttctattttgatgaagataaacaagatgataaataagaatataaatggagtggtcaaatgtatttaaaaagattaaaatttctgcgtatgaatgctgggttgaaacaaacggaaattgcagatttattaggaatacaacaaactgtatactctcgttgtgagcgaggttttcaaactataccgttacactttttaataaaactagcagacttttacaatacttcaactgattacatattaaatagaactaatgaaataaaaatgtatccggaaagtatttttgaataggaatcaaatataaattatttatataaactttttaaagtttgtattaatataacaataacagaaccggcttactttaaaattggagataatatgagtttggcgtttgacgcagttccatagataatgcttaaagggtcatcagacaaattatagaatgagcaaaaagttaattaaaaatatgcaatacagttggtcatatagtaatcaagatagtagaccattatataaacaaaactaaacaaaactaaacaaaacaaaactaaactaaactaaactatttatatttattaattataaaatttattttttatactttaataaaaaatattatagtgtcgttggtttatagtatgtttgacgaaactcgtagaaatgtttctatcgttttaatcaaaaagttatgtgatggattagatatgactttggaagagtttttttcgtcagaaatatttaataaactcgaacagaagataaaataagtataaatatactatgtattatatggggttatatacaaagttaatttttatgaatattttcttgatatattgaacactgcgtgttcagataatggctcacctaacgcggcggcatagccgcgtttgagtattcatattattgacgttgaaggctatagtaaaataagtcactttgtatcacacccaccaaaggtggggtcacacctaccgatgttcactgaaaaacttgcttttttgtttattaatctagattgaaaacttagcttttttaatgaataaattaatagtaactcgaaatatcaattttcacggtagtttgaaaactagaaaatagatttaaatttttgtatatattgaatactacgtattcagatgatagttcacctaacgaggcgcataaatgcgccctgccgtagttcactgaaaaccctgcttttttgataagtaaatcaatagtaactcggattatctttattcacggtagtacacaaagtcaacgggaaagtagtagggcttttttcatcatgaagcatggcttcatgatgaaatgagcgtgggctagcgccccttggagccgtcaggcgacctaagcgagcagcactttttctttggtgaagcgtttctttttcttgctagaaaaagaaatggttcaaacaccattattatgtaataataaaattttttatatggggtcatatacatagtatataaatatttttttcaaaaagtaaaataataaatattatatggagccacatacaaagtatatagatagtcttctgagtaagcaaaataagccgtatattaattataaaaaataatccctgtctaaaacggacagagattattttttatttgcccaggctttgtcaagccgggttatcgcctgctctatttcagcttccgataattgaccgtatcccattacaaatgtgcttgccggaagtttggggtttggctttatcagaaaggttgtaagaggcaaaagttttacccccattttagcagccgatatttttagttcgttctcagtcattccgttatcaacggaaactataatatgagttccgccgctttggtgatgtatagtaacgtattttgaaaatgaacacgagttgattttgtctttaagatatttcgatttagacaaatatatattatatagcttctcgagatgacgctggtattttccgctttgtatatattgggcgacaacctgctgttcaattcttgatttaagagttgtgtagtatggcatacgttcatcaaaacgttcttttagttttttgggcagtaccaggaaccccgtttttattgacggggctattgacctgtaaaacgagttcagtaaaataaccttttcggaagtatctcttagaaacagcgggtcgagaccgcctttgtcggaaaagtctaagtcaaaatcggcttctattatatagcggtcaggtttttcgtttgcccagtctaaaatttctttttgctgtgccgctgtcatacgataacccgttggaaattgcccgtcgggcgagatgtataatacgtctatatcgcttttatataagtcctctgcatcaaatccatccaaacctacgttaatcagagtagtttgttttccggaatttttgaccggtacataacttcgcgcgtagcacggattttcaaatccaaatactgtgctgctgccaaatatgtgtgatagctgttcaatcaaatagtcgctgccggcgccgattataatttggtctgttgagcatgatattccatgaacttcatataaatagtgcgccactgcttttctgagtgatttttctccatatttatgaccgtattcaaatagctccggcttgtcgtaaattatttcacgatatagttttaccagagtgttttttgggatagacggcaaatctatgccgttttggctcatgttaaaactgattccatgcaggtcataaaaatccggctcaaagatgtcagtgtttataggactttgttttctcgcaaaatatccgcttctgggctgtgagatagcataaccgttatcaattagtttttgataggccaaatctacggtgttttttccgaggcctaaaacttcagtcagtctgcggcgggagggaagacgttcgttatccaaaattctgccggatactatatcgttcttaaacgcgttataaagctgaagatacagtggagtgctaagcgttttgtcaattttgtattttacgtctttcattctctcaccttctttgcttgaattgagttaagatattatgtctatttttacttttttattgtataattataccactttatttttttacagtcaacgcggatatttttctatatacaaactggacctataaaaattttttcatctggacctgttaaatcaaaaattgttgatttataataagtataagtaagcaataaataattggtgttttatattatgactgctgattatttctttgtttatagctgtattaattagtatttaatttaaaaaattaaataaattgatttcttcccaaaaggccgcgtaactgcggcttttaatcttttataaatgggtttagtttaatttgacaataaaatgggatagtgataatatattgttattatgaaagagaaatcaaatcctaaaatttttaagaatattattttctatgcccgcagatattttccgtgggctttggttgccgtgcttgcaactgtttctttttcattccttgaggtaatgaaggcaaatatattaagagcaattgtggatttagctcagagcgggaatgtgaacggcatattgcctgagttcttaaaagccgttttaataattatttgtgttatggtttgtattttcctgagcagatatgcggccggacgtttttcttccagcgtgatgcgtgatgttaagagagacagcgcaagacatatttcgcaaattcctttaagttatatgaactctaataggagcggagagcttctttcaaaaatgagtacggacgccgattcggttcagagctttatggagggggacttcatacagcttattcagcttccttttactattgtgttttatgctatttatcttatttggctgaatccgatattgtttttagcgtgttttgcaactcttccgatcttgattccacttggagccagttttgctataccgtttagagttggttcaaaaaaatacatgaagtatttgggtaaggtgagcaacactgttgccgatatggtcggaggaatttcagttgttaagtcttataatatggagagagctcttgctgacaaataccagtcgggtatagagcgcgcaaccaatatggcgcttaaaaatgataagtgtcagtataaaggttcgtttatttttaatttggcgcgcaatataccaacgttgacctgtctggttttcggaggttatttgtgtttcaaaggcagtttgactttgggcgcactgatagcgttttcatcactgctcggtcagacgctgagcccgcttatgcgtgcgtcttctatgttttttaatcttaaatccgcgtccgcttcagcggagagagttttttcaattataaatgaaccctctgaacaggagggcagcgaagtttctgcttcgcttaacggagacgttccggctatacaatttgaaaatgtaagttttggctacgaagaagataagcccgtattaaaaaaccttaatttatcaattaaaaagggtgagactgtgggattcgccggagccagcggatgcggcaagagcacaattcttggactgatttgcggtttttaccggccttcatcgggaagaattttaatcggcggaatagacatgggcgacagaaatttaaaggctgtcaggtctttgatttcatatgtgtctcaggacgcatacctttttccgttttctatatatgataatattgctatgggaaaatcaggagcaaccaaagaagaagtgatagctgccgcaaaggctgcatatgctcatgactttattatggagaccgaaaatggctatgatactatagtgggtgagcgcggctccagactttcgggagggcagatacagaggatttcgattgctagagcaatgcttaaagacgcgcctatacttttgcttgatgaagccacttcggcgcttgatgtaaaggcggaggcggaggtgcagaaggcattggataatttaagcatcggaagaactgttttagttgtggcacatagactgtctaccattaagggggctgacaggattgcagtgatagataatgggatagtggctgaatgcggcagtcatgatgaactgctgaaaaaagacggcttgtatgcaaagcttcaaaacgtgcatagccagcagggaggtgaagctctgtgaaagttttagacggattaaagagctgtttttctctgatgggaaaacacaagtatgcgtattggataactttgatattggatatatctttaggttattgtgcagacgtaatgctggccttgcttaataaaggtgtaattaattctgtgacaagtctgaattacgccgcttttatttcttctatatggctgggagttgctgcggttatcgtttatttgataaacgttttggaccggtattttaatatgcgttctattaggtatataatgcttgatttaagacatgatttgttcagacatatggaatttttatcggttggatattttgaacaaaatcacagtgctgacagtatattcaggctaaacagcaatgtcgaaaacatgaaaagagcatataccaaccattgtcctaacatatttcagggtattatcggcgggcttggctcgtgtgtttttattctgattatggatgtccgccttggacttatttcattagctgcctgcggacttacagttctgataaacattaagtttgccgagccgctaagaaaaatcggaggcaaaattcagcgttctgaatctgctcttttaagcaggctgtctgatttggtagcaggattcagggttattaagctctatgatacagacggatttattataaataaatatgaggagaccaaccggaaaactgccgggcttagaataaaaaggattgccagagtcggcacgatagacagcataagtcatcttcttaattttataaacacttttgttattattactatcggagctgttatggcggctaaaggctacacagattttggaacagtgtttgctattttgaccgtgcagggaaatgtaagcagtatgcttttgaattttggaagcgcttggggtatgatgcaggagagcgttgccgcgtctgagcttattcatgaggttttgaatactgacaaagaagagcgcaagccggctatagccccggaagacgatacaagcgaccattacatagcgtttgaaaacgtttcgttttcttatgatgacagcggtcctgttcttgacggacttaatctgagtgtaaaggaaggcaccgtagccgcgcttgtaggacccagcggaggagggaagagtactgttattaaacttctgccggagttttatcctattggtaaaggaaagatatattttgccggcagaaacatagattcttattccgcggatgaattgagaaatatgatatcatatgttccgcaggacgcgtatttgtttgacgccagcgtaaaagaaaatataggctatggtaaaacaaatgcgtctgatgaagagattatagacgctgctaaggcggcaaatgcccatgattttattatggaactcagtgacggttatgatactcttgtcggtgaacgcggtgaatctctctcaggcggtcagaggcagaggatagcgattgccagagcgtttttgaaaaacgccccggttctgctgctggacgaggcaacctctgctttggacaatgaaaacgaagcgatagtgcagcaaagtatagaaagcctgatgaagaacagaacggttattgttgttgcacacaggctgtctacaatagaaaatgcggatataatttatgttattgagcatggcagagtagtgcagctgggaacacatgaggacttaaaacagcaggacggagtttatgcggagttagtaaaactgagcaatgcgtttaaataatcgaattatcttaatataaacattggcggccaatttccggccgctttttttatagcatttatttaaactggtatttaaaattataaaaataatttaattacaaatataaatgatttaagttatcaaagtttatatgtttaattatactattaaaaagttatgttaatataattaattaaatttttataataaaaacgtttcgaaaacaaaataataataatttatactgtgaatttggttttgacatatttgcatatttatggcaatatttatgttttatgacaataaaactgtaacacgtgttgttatgttgcaaactggtatttaaaaatatttgttaactggctattgatattgatttccggtttgatataataatatcataaaatataaattatagttttgaggaggagaaacggaatgaaacaaagacggtgggtaagtttggttgtgtcagtagtgatgcttttgacaatgatgccaggaatcacagtgttatctgcaaatcagacagatgaacaggtgaatacggcggcgtctgagaaatataaaacatctgattttgatttgggaaatgcaaatgtaaaatctgctgatataaatggttattataacgcaaacgcggatgtttcggcggagtatgtatatcctacatctgatccgaatggatatatatatgatatattatcggcatattttggaaatgatggaaaactgaatgtagtgttaagatataatggaaatgaagcgaatccaacaggaaagttgttcgttggtacatatgacgaggcggacagcgaaataatgctggacgcaaagagttatgatataaagggaacgacggttgaaggtcttgattatatcaagcctggaaaaggaaccgttagactatatatttgggacggtgttgattccttgaaccctctatccggagtattaaagccgggggatactcctccgccgacttttgctccgacctcaacaccggaaccgacagcaaaacctactgctgtaccgacagcaacaccaacagccgcgcctacagcaactccaaccatggttccatacgataaaaaggcggcagttatgcaaaataatactgttgtcggtgagtatgatacaataaggggagcagttgctagggctaaggaaattaatcctaaatcggaagcagaaagggttacaattaacgtaaaccctggggattatgaagaacaggttaagtttgacggcgttaattatgtaacgctgcagcaaatgccggaaacaactgggaaggtaacacttcactggtattactgcacaggatactgcgcttcaaactgtgaccttgcaggaaactataatcctgatattgactggtcacttgatgaaacctggaacggttataaggccggagacgaaaagtttacaaagtatgagataggtgaagttattacaggtaagactatttcatattatgataaaaatggtgtggctcataaaaatgttaaaccaaatgcaaacaatcttggttctaccagaacatatgaccaaatgggtgttcttattgtaaactctaatgcaagcaatattattgtaaaagatttgaatgttgtaaacagtgttcctgttatggtgacgcagggtgagaaggatgctcatttgacgccgcagcttgacagaattgcaggtgttgcaacaagctatgttctcccatatcgtgataatcttgcaatatgcgatgagaacactcctgaagacgctacaacaagagttaaaaatgctcttgccataaaagatgagaatggaaatgcttcaaagagaatacaggctcttcagaatttgactaatttaacagcgggcgagagcgcatatttagcaaagtctgcttcatataatgagcgcggtcacgctcttgcgctccacggtgataaggttatattagagaatgttcgcgcaagaggaaatcaggattcagtatatattacaaatggaagaatgtatttcaaaaactgcgatttgataggaggaacagactatatatacggagacgcaacggcagtatttgacaattgtaagctgggcgctgagggtatgtcaaatgcaacgtcgggggcaacaataacggccgctaacaccagggctgaaaacccttacggttatctcttctggaactgtgagatttataacatgcgttccaatacaacgtcaaattcaaattatggaagaccatggaacgattttcctcaggttacttattataatacaactcttgatgactcggcttcaacgggcaagagtaaagtaactatcagtgctgacggatggaatgatatgacaataaagaaagaccaggcacgtttctttgaatatggaactaaaaataagagcggaaaaaacgtagacctttcaaagcgtgttaaaaatgcggcagacaaagcagggatgggtacagtccttaatgactggcagattcttgaattcaatccaagaaattattttaccaacagttttagaagcgacgcgtgggatccgatgaattttagtgagaacttaaagaacgttgacgctgcaatagccggagcaacagttgtaattcctgagaatgaggaaacaacaattactcttccgacggctccaaccggagtttcatttaaatgggaatcatcgtctgaaaatgccactgtaagcagtgacggaactaagctgactgttgtccgtcctgctgcaggcgaaaatagtattgagtccagcgttgtgctatatgcaagggataataacaatggttatggcgataagaagacaatacctgttataattacacctactactaacacaaaagatgtatacaccgtttccggtaatattgaactttctcaagcatcagaaagtgatgttacggtaacaatcaagtttatgagcggagcggcacaaataaagaaggttgatgtaattgttccggcaggtgcaaaaactcaggcttatacagtcgaaaacctaccagtaggaacatatattgcgtatatgtctataggtgatcctttatacaacatagcaacagaatctcagaaagtcgatggtactataggaagcattgtttcattaaatattgatgctaaaaaaatgcaggagataattgtcagcagccctgattttgacggcaaaggctatattccgacaattaactcagcgtcaggcttcagcggcggtatttataccgttaccggaaaggaatcagctaatttaggcgaggccggcaataaggttctgaaacttactaagaatgaaggaagtaaagtagctgcaaaaaccggtgcaagttttaacctgacttcaatgcttccgagcggttcatcgctggcaaatactaagacaatcaaattcagctatgatttcttaatggaaagcacagattatttcccgaataaccaatcaggttttgaccttgcaacaagcacaaagaacggcggcaacggaagagccgaagatcagactagatttgttcgctggggagtttataaaggctggagccagtttaatatatacacagcaaataataccagaataaacggtgataatactcagttcaacagaggcaacaatatggctaacaagtggtatagaattgttgcagacattgaccttgaaaatcaaattataaccacaacgttgtatgacagagattggaaaacgggtgacgcaggttcatatatcttaaataaaaaaccttttgtggttgcggctaaggacgctgacggcaataacaatgaatatccgaaaaatatagatttatctaacttatactttaatatttacatggatgtatttaacgatacagctaacaaaatggaatattattttgacaacattgaactgacatatcaagattttgaataataattaaaactgcaggaggaaatctcctcctgcagttttattcaaaattttattaacaagttaaataatttaaaaattatttatagatttcttcccaataaattctaaaacataaactcccaaagaatgagtacattcgcgggagtttttgttgctttaacttaattttgctatcagattttatatttgtaaactgttaaattttagtgttaaaaccgtatgagaagttttttaaaaaataaatattccgattattgctccgcatagtatataaataatcggatgaactttttttaagggctttatatagagtaaaactaaggttacggcacaaagtatcagggcttttatatccactagattcataagtttttttgtttcattgtataaatccaaagtgagaattgtgacttttataacctggtatgcggcaactgctattagaccggctactgccggacgtagtccataaaatatatcttgaacgatttggctttcctcaaacttttttaaatagtgagctattattatgataattataacagacggtactactaagcctattgtagcagagagagctccgaatactccggcggttgtgaaaccggtgaatgttgccatatttacacccataggtccgggggttgattctgatacagctatcatgttggatatatcgttcatatttatccactctggatatcttacggctatatcataaataaacggtaatgtcgcaagaccgcctccgaccgcaaataaaccggttttaaaaaattcatagaacaaaagcagatatgtcattttttgattcgcctcctcagttgtccggcaataagaccgacgattaatgcgccgataacgacgtagacagatgatactcctaatattccggctactgcaaaagctgcgatgaaaataaccacgccggttaagtctttaacacccgacttaaaaaatttgactacagcgtttataatcaatgcggcaaccacagcgcgtattccgataaaggcatgagccactaagggaatatcggcgaagttttgaagaaatgctgcgattataattatgataacgagcgatgggaatattacaccggccgtggctaaaattgctccgggaacccctctgtatttgtagcctataaaagtggcggtgttaaccgcgataactcccggcgtgcattgtccgacggcaaaataattcataagttcttcttcggttgcccattttttattctgaaccacttcgcgctcgagaatcggcagcatagcgtaaccgccgccgaatgtcataactccgactttggcaaatgttaaaaacatgtctaaaaacacgtgcaatcatacccctccatgtcataaattttttgtttataaagattttattatatacgagattatctgttaaccgcggttataacaggttttccttctctgtcgagcagcggtgttaaccctcctgcatttgaatctctgtgatacagatagtttattcctgtttctgtatcaacccaaatttctgtagtatttagtattccttgtgaatatattttttcaaatctatctttttccatattgagcttcctccaaatatctctaagaatttgtctaaaatattatacgtattatttttaaaaacgaatctgatttatagactggattaaataaaaacaatagatattattgacagaattaatccaatattaccataattttcagaagctgtaaatacacaaattttaatcaacagaagcggtaattttgtcaattttttgattgttgctgtaggtttgtcaatgatgtgttacaaaaaagattaaaagagttcaccgaaattgataaaagagttgatgtagtcaattggagctttccaattactgaaacggagttatatgtatttcttaactatttaaaaaggaagtatttaatggatttttattttaaatagttaattatttttatataagcaaaaactttccggtgtttttactccgtttcagttttttatgcgtatgcttgtccaacttttcggagttaccggagcgcgtaatgatttacgccctccggaatttttcagtttatgtaaaaatccatctttttaattctacactccataatttctaatagccaaatatttacctattattaaaataactaatcaataaattgaaatttattatttatatacctctcttttccgtcaataacaacttttgctctgccattaacaaacgattcagcataatcatacctgttttctgttgcatattctccggatttattaatatatgtgaactcatctttttcatcaaaacttgcaaaaagcggtctgggtaaatttcctttcgtttgaacaaccgctaaaccttcagaaaaattattaccgcttacaaatgttttatcgccaaacatcttattacctgatttatcaatataccatgctctaaaaacattatctaccgtatcataaacacatgcgcttccatccttaaaatctgtcgacatataataatattcaaatggtataactaactctcctttgacatttatataaccatatccatcaaatcggtcagtccccgtacaaattacatctcttgactttaccaatgctaacccatcagaaaaattattcgcctcagtgtatgatgcttcaattacaatatttccatctgtatctttatatccatataaacctttatcttcaaatacttcaagattattattagcttcattattcttttttaatgctatattatcaacacattctccctttgtgtttattctatatggatatggataaaaatcagattttactgttgcaatcccattctgaaaatcacctgcttctgtatatatatcaggtattacaaaatatccatagtcgttaatatagccataatatttttttgaagaatatttattactttgactcgctgcagctagaccatcagaaaatttactgcagtcagaaaaatatccatattcattctcaggcatatcttctctattaaaatagtaatatccaaaccactcatcacaagatatgtctccgacatgccacttatcaggcagatttgagtcatcaatgatatcaacaattgaatattcatcatcccatctaaccatacaccccaaagcttccgagactgctctaagaggaacataggttctgcagtcatctactaaccttgcaggaacatctaattttatatattctttattttttatcattatatcactgtttattgttacggatatagtaatattattttttgtggctataactgtttgattgttctcatcccaatcaacgtcagcatctaaggcttcaaaaatcccccgcataggcaccatagttctgttatcttctataaacggatacatatcaaggtttatttcattattatttatgtagacttttatttcgtcgttataacttaaattttcagaacaaaaacaagttagagacatcattaatactacaattattatacttacaaaacgtatacatttcattttacttcctccaacaaatattattttgccagcaatatcattacattgcttatacatcaaaaactttatgctttaataaaattcttctaaatattttctatatactcataaaaactaaaacggaactatatgtattctctaaccattcaacatagaagtatttaatggatttttatttcaaatgattaagtaatttttatatattcaaaaactttccagtgttttttactccgtttcaattttttatgcgtactcttgtccaacttttttgttttaccggagggcgtaaatgatttacgccctcaaaatttacttactaaacattattttttaaagttatcttaatttattattttattaggaacctttattctctatagccttttttccaatcatctatgtaatacatatttacatatccccagtagccggtctgaaatcttggtatgtataaaatagttctcactatttttgaaaattctttccatgttatattatcgtctaactcttccggttcaataaatactgacgatgatgaaattaaattcccatagtttatcatcctacattcttcagctaaatctaaataaaatgaatctgataaatcacctttataaagaagttcactatttaaagtccttaatgccataactattacatctctatatgtagctaaatctttaatattagctttatgtaatccattttctatatctcctttaaatatactaccttctactccccaaactactattgtacattcctcagtaccattttcaatatcttcaaattcccatccaagtgttgaacatatactctcttgattattcctaggttctaagtcattatcaatatagaccaaacatgagagtgtatcaacaacctctgcccttgttactaaatcatttatatctttttctctatattcttttggtactattcccaaatcacatattattttaaaatctccatcagcccaaaattgacctatttgtgcacttactgttatacttgataataatatacatattgcaatcatacatcctattgatcttttcattttttacacatcctttttatttatataatactttagttataaacatctaataaatattctactatgttgggtcctctgcttctcaatattgctgctgatacataatcacctatccttttttcttttaaatcacccatatctgattttggtgaaaaaacagaattacttgttactgtcaaatcatacggaaattgaccatatccattggttcctattactaaatctgtattttcacttcttgtttcataagatttttcagctctaaaagcatcttctattgtcattgcaaacgcttctccatattgtttttctatataactttttatttttgactttgttatttctacacttaattgtttttaatatacttacttacgaataaaaaactgaaacggagttatatgtatttcttaactatttaaaaaggaagtatttgatggatttttatttcaaatagttaattatttttttatattcaaaaactttccggtgtttttactccatttcagttttttatgcgtatgcttgtccaacttttcggagttaccggagggcgtaatgatttacgccctccgcaacaattttactttgtataaatatctactctttgcaatgcttcgtcccattctacccgacaaccgaatgcttctgatattgctctcaatggcactaatgttctgctgtctcctactaatcttgcaggtacatccaattttatttcttctccatttttttgcatcctattactgtcaattgtcactgatactgttattccatcctttgttgctgttgccgtttgcgtttcattttcccattctacttctgctcccaacgcttcaaatattgctcgcattggcaccaatgttctgtctttttctgttataggatatgtatcaaaatttaactgcttattgtttaaatatatttttatttcattgctactttcatattgaggtattttatcctgatttacaaatttaggagaattgtttaactttacagttttatgattaagaacaaatatagtatttaattctccagcataatatactgtattattttgctttaattttgtatgaccagtaaaacaacatacaatgttattattaccaccaataaattcagatacagtactttcatcgtctgaactattttcatataacaatatctctccaatttcggttaaatccctattataaaaaacattttcaagtctaagtaaattctcaccataactaaaacatttgtcatacaaattattaccttgtatatattgttttaactctttactaccaataacctgcccatctggagaaactagttctataaatccagtattgttctgattttcgtttaaatacccgtcgaataaaaccataccactatccaatattctaaaatttttataatacgttccatgttcaattatgaaagtattagtatatttaagttcattatcccttccatacatatatgcatttattttgtcaaatttatcgttttgttttgataaaaaggtataaacttttattgatgattttgaatcatatcctattaattctccgctgtcaggcagttctatcttgttcttttgacaaggaaccaaatccttatcaattatatattttttaccgtttagattgtattctgcataaccatttgaaaatacctcataattttcttctttatcatattctgttgctatacttgaatgatattttacaaaatcaccttttgtactaaaaataacattacctgtattatcaaaaaagaaattttctatctctccagaattattctctttgctagcaaaccccataccatctttaaaaattgtagcaaagttgtatattggtggaacaacccaattatatgactcgtttatatatccatatttatcatctatctttacccttgctataccatcataaaacaaaccattcaataaatcatcatttttattataataccttattgaaccatcatatccgactaacgccatattccatttatcaacagagttttcattatcgtctattccgtaaaaatctatccatattccattttcatctgcataataaatatttacagcttgagcatctaaaatacaatcatcatattttatggcctctttaagtttaataacatgatattcgttatcaattttatttgcaaatgtttcattatgttcattataatcattttcaatgcttgaaaaagctaccatatttacaaacaaacataatggtataagaataataagtattttttttaataatttcattttcatcacccaatctttctattctatatactcccagccaggagcgtatttatttaatatatcttcatgatccgaatatgcaagccaattattaaaaccattatttttatagttatataacatcatagcaaaatccactggttgtgcaaaacttccattcgacataatactcccagtattttttataggtttccctttattgaaaggtttactgtcaaaataaatatcatataatttaaaaccaccatgaccaaattcatgagccgctacattttttaagtttcttatacaatttgttactgcataatcatattggatttgaatttcctcttccgtaaaatcattatcatcaattctcgtcggtttagtacaatttaaagtaatatcacctgatctgattttggtgaaaaaacagaattacttgttactgtcaaatcatacggaaattgaccatatccattggttcctatcactaaatctgtattttcatttcttgtttcataagacttttcagctctaaaagcatcttctattgtcattgcaaacgcttctccatattgttttttatataactttttatttttagttttgtcacttctacacttaattgtttttaatatactttactacgcataaaaaacttaacagagttatatgtatttcttaaccatttaaaaaggaagtatttaatggattttatttcaaatagtttattaattttatatattcaaaaactttccggtgttttactccgtttcagttttttatgcatatgcttgtccaactttttggtgggattaccggagagcgtaaatcattacgccctccgcaacaattttactttgtataaatatctactctttgcaatgcttcgtcccattccacctgacagccgaatgcttctgatattgctcttaatggtaccaatgtcctgctgtcttctactaaccttgcaggtacatccaattctatttcttctccatttttttgcatcttattgctgtcaattgtcactgatactgttattccattctttgttgctgttgccgtttgggtttcattttcccattctacttctgctcccaatgcttcaaatattgccctcattggcactaatgttctgtcaccttctgttatcggctctatatcaaaatttaatcttttattatttaagtatatatttatttcaccataaacatctttaggttcaacatatttacttattctatttttgtctacaagcatatcatcattactcaaatcttttttattattataaactatgtatacattacttaactggtaaagacctttactgaatatactatctgatgaatctgcatattttagtaaactacatattaattttcctttatttacaaaaattttaacttcataattatcattgttatataaatgacccacatattctaagttattatccataacaattccattatcaaatactaacatattataaaaactatatacttgttcaaatggaaatccatctttaaaataataagatgtataacaatcacttgttaatgcagaaaatagtacaatgcaatgtgtatcattttcaacatttaaacataaaattagatctccattatttaatatttgacttgtaaaaatattaaattttttaccaattttatcacttaaatttagtgcgtttagtaattcaccttttgaattatacccatttattattatatcgttatttttttcatcagctctataatatatattatttttaattctattatcaaaagtgatataacctccttgacttacttccttttcttcttttgaatttaagtcatacttatttataatattaaaactattatccaacaaatattgactcttagtctttagattacttaattttaaaataacatcaccagtagaaaactctgcataaaattcatcttgtctaaaagaaatttgtacttctccgtaaatattaaatatatatattcttttgtttctctcagccataataaaaccgttatcgcaatacactattctctcatatataggtggaattatccattcatatttactatttatacatccatatttatagtttgttttatgctcgtctaaatttttatctgtcgtttttataattgcgtatgtgatattatggtgatataactataacacaatttatgagttttccgtattctttttttctctttgtaacacatctattgtaatcctacaattttgtcaattttttgattgttgccatattgacaatcaataaacatagttgtataataattgaatagccacgttgaaatggcgtaatatccggttcggcgtgaataataaattattagtaagggagatgtgtttatatgatgaaaaacggtgccgatatagttatggaatgcttgctggagcagggggttgacacagtctttggatatccgggcggtactattttaaacgtctatgacgcattttataagtactctcataaaataaagcacattttgaccgctcatgaacagggagcggcacacgcggctgacggatatgccaggagtaccggcagaacaggggtatgttttgcaacatccggtccgggagcaacaaatttggttaccggtatagccacggcctatatggattctattcctcttattgccgttacttgtaacgtcgccactaactggctcggcaaagatacgtttcaggaggttgatattgtcggtgtgaccatgccgataaccaaacataactttttggttaaaaaggcttccgatatagcgcctacttttagaaaagcgtttagaatcgctgcttcgggacgtccgggaccggtgcttatagatataacaaaggacgctacggcggagcttgctgattatgagaaaaagatacctgagaaggtagataattataaaatagatagtgaagtttgtgattttgaaagagcaataaaacttattgaagaagctgaacgtccgcttatatatgcgggcggaggaattatttcatctgcggcgtctagagaactgtgtaagtttcaggaaatgctggacgcacctgtcacattgtcattaatggggcttggggcttttccggccagcaatgaagcgtttaccggaatgattggtatgcacggtacaaaaaccacgtcgctggcaattaaaaattgtgatttactgattgcaatcggcgcgagattctcggatagggttatttgtgacccggggacgtttgccagaaacgcgaaagtattacatattgatgttgacagcgctgaaattgataaaaatatcaagactgacgcttatataatcggagatgcaaaagcagttttggatgagcttaacaagagcttatcaaagcaaaagcatcctgaatggatgaaggagatagcagagtggaaagctgagtatccggttaaatataagggcagtgagaaattttcacctgaggatataataaaaacaataaaaagtgcagtagatgaagatacatatttagttacagatgttggacagcaccaaatttgggcagcacagttttttgatgttgataagcccagacattttgtcacatcaggaggtcttggcacaatgggattcgggcttggagcagctataggaacccaggttgcaaatcctgacagtacggttataaatataacgggtgacggctgtttccacatgaatctacaggaattgtcaactgccgctaaagaggagcttccggttattgatgttgttatgaacaacaatgtattgggaatggtaaggcagtggcaaaggctgttttatgataacagattttcaaacacaacacttaataagcgtaccaattatgacaaggttgccgagggtttaggagccaacgcttttacagtttcgaatgttgaggagcttaaggaagctctgagcgaagcgcttaaatcgaaagataagccaacggttattaactgtttgataaatcaagaccatacggttctgccaatggttccgggcggacagtcgatagaggaaccaattcttgaaatcaaagaagacggcggggaggtttagtattatgagtgataataaagagatgcacgttctgtcaatttatgtcgaaaaccatgcaggtgtgctcagccgaatttccgggctgttctccaggcgcatgtataatatagacagcttgtctgtgggtgagacagagaatcctaaaatttcacgcatgacaattgtcacccatgctgatgacaatacattccgtcagatacagaaccagttggcaaagcttgaggatgtaaagcgcatatgcgagcttcacaaggatacctctgtactgcgtgagcatgttttgataaaggttaatgcaaaagattccacgtcaataatgcagatgtgtcagatattcagagctaatgtagttgatgtatcaagggagcttttgacgcttgaactcaccggagggcccagtaaaatcaacgcatttatagagctgatggagcagtttgatattgagggcttggttcgtaccggtctcaccggtctcaagagaggtaagtccgaaagacctgaagaattgaatcagaaaaacaattaattttaatatacactgtataaataaaagatatttggaggtatttacaaatggcaaagttatatcacgaaagcgactgtaatttgggacttttaggcaataagaccgtagcggttatcggttacggaagccagggtcacgctcacgcgctgaatcttaaagagagcggagttaatgttattatcggtctttatgagggcagcaaatcatggaagacagctgaggaagccggatttgaggtttatacatcagcagaagccgctaagaaagctgatattataatgatacttatcaatgatgagaagcaggcaaacttatataaagaaagcattgagccaaatttggagccgggaaaagtattggcatttgctcatggtttcaatattcacttccagctcattactcctcctaaggatgttgacgttatcatgattgctcctaaaggtcctggtcacacagttcgcagtgaatatgttgcaggcaaaggcgttccttgtcttgttgctgttgctcaggacgctacaggaaacgctatggatataggtttggcttatgctgccggtattggcggagcaagagccggagttcttgaaacaacatttaaaatggaaacagagactgatttgttcggtgagcaggctgttctttgcggtggcgtaaccgctttgatgcaggcaggttttgaaactttggttgaagctggctatgacccgcagaacgcatattttgagtgtatccatgagatgaagcttatcgttgaccttatttatcacggtggattcagcgagatgagagcgtcaatttctgatactgctgaatatggtgattatgagattggaaagagaatcatcaccgaggacacaaagaaagagatgaagaaagttctcacagagattcaggacggtacttttgcaaagagctggataacagaaaatgctgttaaccgtccgcacttcaacgctacaagaagaattaaagctgaccatcagctcgagcacgtaggcgctgaaataagaaagctgtattcatggaatgatgagaaataatttcaggaatacttatataaagtaaaaacagagggtttttacagagattgttttgtaattataacagtctgtgaaaaccctttttggtacataatagcggattaaattgcctgacagatatggtggtgaaacggcttggatttaactgacagacatattggtaagaacatagaggtatttgattctactttaagagacggcgcccagggcgaggggataacattttcggttgaggataagcttaatatagtaaaagccttggattatgtgggagccgattatattgaggccgggaatccgggttccaaccctaaggatttggaatttttcaaagaaattgatttaggttctttgagacacgccaagcttgtagcatttggttccacccggcgtaaagatataaaagctgaggatgacgaaaactgtttgtcattattgtcggcggaaacagaagcggtggctgtgtttggcaaaacctgggatatgcacgtaactgatataatcaagaccagccttgatgaaaatctcaatatgatttcggatactgtcgcgttttttaaaagcaggggcaaggaagttatatttgatgccgagcattattttgacggatttaagagaaacccggaatatgcggttaaggctttgatggctgccgcggaggctggggctgacagactggttctctgtgaaactaacggcggatgtctgccgtttgaagtagctgagattactgcggaaacctgcgatatatttaaagacagcattataggtattcactgtcataatgacagcggctgcgctgtggctaatactgttgcggcggttcaggccggtgcagaacatgttcagggtacgtatttgggatatggagaaaggtgcggaaatgcaaatctttctactattatacctaatcttcaaataaagctgggttataattgtgtgcccgaaaaaaatcttgaaaggtttaccagaaccgcgcgctggatttcagaggtagctaaccagcctttatacagaggtatgccgtatgtcggcggttcggccttttcacataaggcgggtatgcacatagacgcagtcacaaaagagtcgtcatcttttgaacatgtggcgcccggaagcgttgggaatgaacggagatttttgatgagcgaggttgccggccgcggcacggttcttaaaaagatacagaaaatagccccggtgcttacaaaggattctgctgaaacctctgagatatgcaagcgagttaaacagcttgagtatgaagggtattcgtttgaggcggctgaagccagctttgagcttttggtcaaagaggttttgggtgagaaaaagaagtattttgatttgaattattttaagacaacagttgaccagcctaatggaaataattttagttcttcagctattattaaaatcactgtcggagacagaactgagattacggcggcggagggagacggacctgtgcacgctttagacggggcgcttagaagggtgcttgaaggattttatcctgagctcagcggagttcatctgacggactataaggttcgcgtgctggagccgcagaaagctacgggcgctaaagttagggttttgcttgaaagctccgatgagagcggaagctggactactgtcggagtatccacagatgtgattgacgcgtcttggattgctctagttgagtctgtggaatataagctgatgaaggaagaagaaaaaataaatcaggaaacaggaggttaaagatatgggaatgacaatgactcagaaaattcttgccgcacatgccggtcttgacaacgttaaagcaggacagttaatccgtgcaaaactggatatggtattgggaaacgatgttacgactccggttgcaataaaggagtttaaagcggcaggctttgaaaaagtttttgataaggataaagtgtctatagttttggatcattttacgcctaataaagatattaagtcggcggaacattgtaaaatgtgccgtgagtttgctgttgagagagatgttactaatttttatgacgtgggcgaaatgggcgttgagcacgcactgctgcctgaaaaaggtttggtggctccgggtgaggttattataggagccgactcccatacttgtacatatggagcggtgggcgcgttttctaccggggttggttcaacagatatggcagcaggtatggctaccggtgaggcttggtttaaggttccggctgctttgaagtttaatcttaccggaaagcccggaaagtggatttcaggcaaggatgttattcttcatataattggaatgattggcgttgacggagctctttacaaatctatggagttcaccggagacggtcttaaatatttatctatagacgaccgtcttactatggcaaatatggctatagaagccggaggaaagaatggaatatttgaggttgatgatataaccgaggcttatcttaaagagagggttagccgtgaatatacagtgtatactgctgatgaagacgcagagtatgagaaggtgtatgacattgatttgtctgagctgaaaccaactgttgcatttccgcatctgcctgaaaacacaaagacaatcgaccaggttggagaagttaaaattgaccagtgtgttataggttcatgtaccaatggcagacttgaggatttggaaaaagcggctgaggtatttaaaggaagacatgtagcaaagaatgtcaggactataattattccggccacacagaagatatatcgtgaagctatgaacgagggtctgtttgatatatttatggacgcaggctgtgtaatttctactccgacttgcggtccttgcttaggcggacacatgggtattctggcagagggagaaagagcgatttctacttctaacagaaactttgtgggacgtatgggccatccgaaatccgaggtttatttatcaagcccggtagtggctgcggcttcggcaatcaaaggttatatttgcagtcctgatgaattatagaaatatagattgatactataataaggaggttttttcaaatgaaagcacatggaaccgtccataaatatatggataacgttgatactgatgtaatcattccggctagatatttgaattcgtctgatccgtcggagctggcggctcattgtatggaggatatagattcagattttgttaataatgtgaagcagggagatataatagttgcacgcaacaattttggctgcggctcatctcgtgagcacgccccaatagcgattaaagcgtcgggaatcggatgtgttattgccgctacttttgcccggattttttaccgtaatgcgataaatattggtttgccgattatggaatgccgtgaagcggcagaaaatataaatccgggtgatgaggttgaagtggattttgataccggtgtgattaaagatataacgactggcaaggagttcaaggcggaaccgttcccggaatttataaaagacataataaataaaaacggactgcttaactctataactaaagagaattagtatatatattagcggcggtattagtcattattttatcagttgggttttgccgccggaataatgaattattagattttaccattacagaaaataaacaagcatgataagaatgcggcaaaggctgcattagtgaatttgaaaggattatgatgtcagatgaatattaaattagcagttgtaaaaggtgacggaatcggacctgagataattaccgaggctgaaaaagttttagataagataggtgaaaaatttggtcatagctttgaatatactgatattcttgccggtggctgtgctattgatgagacaggaaagcctcttcctgaggaatctgttaaaatagcaaaggagtccgattcggtacttttgggagctgtaggaggaccaaaatgggatactctccctggcaatctaagacctgagagagcgcttttggggctccgttcagaacttggactttttgctaacataagacccgctaaactacatgatgcattggcagacgcatgtccgttaaagccggaaatatcgaaagacggacttgatttggtgattgttagagagcttaccggcggattatattttggcgacagaggaagacgtcacagcggcaatgatggtgaagaggcttatgatgagttaaaatattctgaaaaagaaattgaaagaataggcagagtcgcatttaatcttgcaatgaagcgtgacagaaagaaagttacaagcgttgacaaggcaaatgttattgagacctcaagactttggcgcgaagtaatgcacaagcttgccaaggagtatcctgctgttgagtttgaggatatgctggttgataactgtgctatgcagcttgtcagaaatccggctcaatttgatgttatagtaactgaaaacatgtttggtgatatattgtctgatgaagccagcatgacaacaggttctataggtatgcttccatcgtcttctttgggagttggcacttttggtatgtatgagcctattcacggaagcgccccggatatagcaggtcaaaataaggctaatcctattgccacaatattgtcatgcgccatgatgcttagagacagttttggacttatgaatgaggccaaagcggttgaaagcgcggtaactaaagtgctgaacgatggatacagaaccgctgatataatggatgaaggcggaaagctcctgggaactaaagaaatgggcgataagattgttgaaaatctttagtttttaatttgtttagaaataaattaaagttgtagggctgtaaaagaataaagtcgtgataataaatcatacaaaaaactctataattgcgcgaaaacagcgctcttttcaaggtcaaagcctgaaaagagcgctgttttttgtacaatgtttttgaaaaatatagtattttatatcccatttttgatttaaatacagtaaaaaatagggaaccgaattccggttccctataaaatttatgaaaggaatgaatttttaatctcaaatgctgctgacaataaattatatcagtttgtctatgcttccgagattataaacgtttgtaaatcccatttcttttgctgttttcagtgccttttcagctcttgagccggcgctgcagtagaaaatcaaaactgtgtctttgctgtaagccgagagaccttcttcaatcgtgtcgaccggaatatttactgagccttcaacagacttttctgcaaattcttctgcagaacgtacgtcgacaaatattccgccattatatacgagagtctcagcttcatcggcttctatggaatctccgcctatgtcgctcatgttgatttccatatttttatttccgtcactaacgtacattatgccgttttctattctcatctctttaatatctatgtccgcagctttttttagcttgtagcacttcatgcaatcagtgaaaactataactaatccatcatcgcatcctgcataaagtctgcccttatattcagctaaattgtttatggtgaacttatctccatattgaaaatctatgtcagattcatagaaaaagtcagtgctgagttgcatgcgaatgccgcctgcagctatagtaaatacttttgtttcgccggttacatcgtttttggtaagaaccacgtcagtgtttccccattttgtgaactgtacaggtctgtcttcaccggctgcttccgtatcgttattgttggtgttagaatcttgtatgctattatcatttaattcggtgtttgtgttcgaagccgaagttccataatactcaacaattattgctgatacaaacttattgcttccgcttccgtaagtataaactggtgtggatatatcggttatttcagcgctgaaagctgtctttttaccagatacagatcttccggttgccagtttaacaccgttttgaacaatatattgttcgcgtccttctccgccgtcaaataaaactgttactttacatggagctttaggagtgaagtataaacagcgctgagtttcgtgtcccataccgcctttccaagctcttgtgaagctatagtcataagttttttcatttacatccgtatatgtgtatttacagctgctggaggaattttcaagtgaactgtatccgcttaaaccattaactgttccatagggctcaccatctgttgaatttgatggactggttaattttgtatagtcgtaatccttgctgtcaagtgaataaactactatttcgctgtcagccggcgttttatatgttttttctgttttttgactgagcggtttcatttcattcaagctgttccatataaataagttgactttatcgccgtctttggctccggtagaaatttcatattcacctgagccgttaacttcagttgttaacatatttttgagagcgccgtcagggctgtaaagcgctgatatcatagtaaccggagatgacagtgtgctgccgcggtagctcagtgtcactttcatatttccgtttgttttgtttaatactttatcgattacgtatggttcatcgtcattgttttctatataattcattctaaagtagtccaaattggttccgttagtctgaatatagacggttgcgcatccgtatttgtcaagctttccatttaacagagcgtcattcagaactccgtggtcgagatttaattctgcctcggaccatttattccaggctcctgtagctggtacggaagctgaggcaataaggttttctgaattcttatttttatcgagacttacgtatattgttccggcatttttgcccgcatatctcacttttagactgtttaaattagaaagtttaatcgacttgtattcaatccatgcatctcctgtgcttccggcgtcaagaccgccgctggtaccggattgtgcatctgtcaaatctgctccgttaccgttatcggcatattcgccttcaacttgcatattgatttgaaccattagaaggccgcaggtcattgattcaatattggctgctgttatttgaactattccgtttccgtatacagtaagaacacctgtctcgctgttaatgtcggcaacttttcgaattgagttgtcaaatttctgtatctgccaaacgagttttgaattatcaatagcattgccatctttatcataagcttgaagctgtattcctgtatatggagaagcgttcgtaacagttccggctgctccgtcataaattggtattccgtcttcgcgataatctataacgcctttttctatatattttggattttctgatataatgctgtagtcattttttagattatccataggtattgaattcaggtcgttgattgctttagcaagtgttgtgcttaaatcatcttttgttgtgactgcatctaaagcggaaactgcgttattgtaaatatcgtcaatctttgcaagattcgattcagaataagcctgtctgggaagtttatcatatgctgttttgaggtttgctttcgctgcagctatttcttccatgctaggtctaattttcagttcatttacaactgtgtatgaatctgattttgtaataccgtttacagtgacagatgcggtaattgttgcgataccttctgttacccctgatgttactataccgttagcgtctactgccgctatgtttgaatctgaactttgatatataacatctgaatttttaaggtctacccatacttcatctgtcattatagcagaaagttttgagtcgatttttgttatcgattccaaacctgtaccatcttcgcggattagaccgtgtacggttataccgtccggcatcgtttttacagtttttagagttgattcaagggttcctgtaacgttaaagttttttgttaaagcgttggcgtcagaagcatttttaccaattattgcggtatatgtgccattaggaacatatgttttttgatccttttcactgaataagtttaagtctttaacatttaatttaaattcaacagttttgctttcgccgggagctaactctattttttcaaatcctttaagctgtttagcaggtataattgaatctgtttgcggatgtgaaatatacagctgagcaacttcttttcctgatgtagttccggtattttttatatctgcgctaaatgttaaattcccgtttgcatctgcattttcggaggatattttcatatttgaatattcaaaatttgtatagctgagaccataaccgaatggataaattgggacgccggtataatattgatatgtatggcccggattttttccgtcactttggatattgtagtctgtatagtatccttcaatgccgtcaatagtctttttggttgagtttgcaagttccatttttgaaatatcggcatttttataccaggttgatgaaagtcttcctgatggattaatctgtccggtcaatatttttcctaatgcagtaccttgtgtctgtccattgtagcaggtccaaaggatcgctttacatttattcatgaatggttccacattcatttgacctactgtctgcattacaacaacagtcttttcaggataagcttctgcgatttgctgaacatgagcctcgtgagatggaagattaatatcatttctgtctttggattcagaagaatccgcgtctccaaaaccttcctgcttaggtatagttccggcgtatgcgataattacatctgcagcgtcaagttcatttttatatgtttcaactgagaatggagctattgccgggcttgcggtaatatacatatctgcaacatcactatagccgccgtcttcgcctgtgtatgcagcttcacaagaaatatatgtgttaaggtcagctgtagcttgtgatgaaaccgatgctacggtaggtccgccttgaccgtatgatatattaaatgagccgcccatctgtgtgcctgttgccatttcgattttaacagaagcaacatctttaaagtccacacttgggatataggctgaagcttttggcgtcatatttacaaattgtccgtttgacagtgtcattccactaacatttttggcttttgagatatctacatttcttgtttttccattctttaatacaagagtgatgctctttacattaaagagtttttcattttctgaaactgcaccaagatgttcaacctctgtatctttatttacgtttttaaattcctgagtgataccttctatcggagtaactgtatcagtaggagttcctgaataatcaccaagaacaagtttgtttgctaagtttcccacaacagctaccttggaggctgtatttttaacagggagaaaatcattatcatttttaagcagaacccatgactcctcagccgctttttcagctatgtcaacatgttcctgtttctccagttcgtcttttgtaatatctgagtatcttgagccttggtcaaattcacctgttctaaatctctgcaagaaaagatgatatacaactgtctcaaggtattcttcactcatatatcctttttcaactgcttcaacaccgttagtagtagcagcacatcctccgcctaaataacattctatatccatacctgagagaaatggctgtgcaatggcttctgcgttagaaacattgcttgaaccaagcataccttgcttataggccgcatttttaatcatatcttcaccggctccgcagtcgcttgttacatatccgtcaaagccccaatttcttcttaaaaggtcagttaagagatatggatttgcagatgatggtttatagttatataaaagctttccgtttctatatattgttgtagcgttatatgacgacattactgaagcaggcattgcttcttcagctatattttggaatacttttgtgtagtaatttctaaaattatattcagtcattactgatgagccgccgcggcggttcttttcgttattgtttgctgcaaagtgttttaatgttgagatggtttttaaatatttttcgtcatctccctgcattccgttaacaaattgtattcccagctgacctgtaaggtaggggtcttcaccgtaagattcttcatttctgccccatcgtggatcccttgccatatttacggttggactccaatatgataagtcagtattcggatttttggctcttgcttctgttgaagtagcgtcggctacttgaaataccaaatcacggttccatgtatttgacatagaaagaggtgaaggaaagctggttgctttgccttgtcttgctactccgtgcagagcttctctccaataattatatgaagatacaccgaggcgcggaatttcagatgctttgtatccaatctgtgaaactttttcttcaagggtcattcttgaaactaagtcagccgcgcgttcttcaaatgtgtaatttgtatcaaggtagattggtgtttcctgattcggatcagttgtcggagccggtgttgcagttggcaagttcgggtcagttgtaggctttggtgtggcggttgccgcttgactgttatatagttttacatatatatagtttccgcagtatgtatttgcaccttcgccagtaatgttaagagtgataagaccttcagcatcggttgtagtcagagtttgagtaaatacattaaaagtctcccagccgctggtgttaatattgcttaaagaagcaatttctgtatctccggcttttacaacaactgcagcgtttttctcgctggcaacgtataagtcaagtttgtcgtatccggaatttttcaagtttacacttggcaatgtgagaaccgcaatactgtcgtcattggttctgagattatccggtcttaaaattccgccgtgttctgagtcggtaacaatatcgcccctgttgcctttaacggtgatagaatcttgtccaaaattaagcattactgaaccgtcagaattttgggttaccgttccatagtcagtggcagctgtacttacctggttgttttctgtgtttgtattatcttcaatgctgactgcagaagccgatatcgctacgcatgacaatgccattgccaatgtcagtattaaagcaatacatcttttcattttcataaaaatacctcctgtttttttatttttattttatattttatacttgtattttaacatcaatcactgtataataacagtcaaacaaattatagttttagtcaattattgctatgtaatgagtatttttgggcaggcttgaaaatggttccattttataaattttaaacgatctgaataactataaagcaccttgagcgtaagttaagtttttatcagcatttgcacgaacatattaatataatatatatttttaataagggtcagcatattaatatagatacaaaagattatgtttaagcgccagtgagtctgctataatcttctctgacacagtttataaatattatcgtttgttcagttttcccttcagacacttttaacagagcttttaaaagtgtctataatatgtctctatgataatataagggaagtagaggagaactttataaatataatgatcaaaattaatgttttttaatgcggattaagctgcataatgtttggagcaagttgtgatattttaaattgcttctaaataaaattataaataaaagataattttaaaattaaaagtgtttatagcaaacagttttataaggcaggataatagaaaaaacagctcttaaatttaagccgttttggcaaaattaagaactgttcatatatgttttgattcaatttattgtttgataactatttttctgcagtttattttttaacataaatattgtttgcttaacttatacccaaatttcatctaagcttccgaatgtgtaaccttcggataagatatattgaataagacgatcgagaacgtttgcgttatcagatgaacatgcgtgaagcagcattactgcgccgtcgtgaagatatggcgctatttgcgtgaatgctgtatcagctcctttttgatttgcagtatcccaatctgagtatgcaaaactccagaaaactgttttatatcccatatcatccgcaagctgaagagtacggctgctgtagcttccttcaggaggtctaatataattcatattaactccaaacatttcagcaaatctattggataactctgaaatttgataagctgcggattcgggagagactgtcggaagaataggatgtttaaaagtgtgatttcctactgtataaccatagtccagcattctttcaactaactcagggctttcttttagataatcgcctgtaataaagaatgctgcgggtatattatatttgtttaagacgtcaataatttgatttgtgtatccttcctcataaccttcgtcaaatgtcaaataaatttttttaggtcttgcggtgtctctgaatattactttatgatttgagattaaagaaaccacgctgctgtctatctcagaatagccgggcgcttttctaaaccaccaatcgtttctggtgttatctatattgtaatacgatgaataatcggatataataggttttggttcgggagaggcttttgccagcggctcataatcagttgaagaaaacgcgtttatccaagctttcatagccttaagctcaggaacccaatagacttcgccaacttcattaagttcttccagacgtatgaaagaggagccgcatgcgttgtatacatcaatgctttttccgttaaacatcagcctagtgtcattcaatgtgtaacgtgaatattgtatgccggttttttgggccgggagcataacgttatctatgccgctaatctgagtttgattattttctgaagtttttaaatcaagattagcagtgcgcgtttcttcatcccagctcacgtcgaaaccatagtattccaaatcgcggactttaacaacaatatatccggtgtcagaagcatatgcaggtataggatagtggttgatatatgctgaaatatcggtatataataaacgtccggttactgaatcagcagatactgggaaagtatatactgatgttgtaatgaatatcataaaagaaactaagagcatactgatttttttcataagtaccaccttttatataatgtttaatatgtttccgcataaaaaatgcgggttgtgtttaaaatttaatgatgtaaaaatatttgcagttataaaaatatttttatctatacgaagacttctgctaacttattttttgcattttacaagcagcatcattggtcttctaagctcgtccgacattccgggaatatccatcatttcaggcggcggaaccgcttcctgaaccgcctcgagctgaaatcctgtttttattaaacccattaatatttgggtcagagtatgatgctgtttaactacttctttacctaagaagttggtttgccgttctcctgtataaaagtaattgtctattggccagtattgaatactgccgtcagagccataaatccattcctgatttacgcttccggtgaaaatcgggtgctcgatattaaatataaaagttccgccgggttttaatgttctatatacttttttgtaaatctcatcaaggtcatttatataatgcagaacgagatttgaaactacgcagtcaaatgtgtttttcggataagagaagttatccaagccgcatacttcatacttgattttagggtcgttatttttcttttttgcttcccgtatcatgttttcgcttaaatcaatacccaagatttgtttggctccgttttctgccgcgtatttgcagtgccagccataaccacagcctaagtcaagaatagttttgtttttcaggtctggaaataattcttttaactggtgccattcgcctgctccgccaagacctttctgacttcgaggcatttttgaatattctttaaaaaaatctttgttatcataaatattattcattttgtctttccttttttcaatcggagattaaatatatctcttgttatagttttttaagttttttagtgaaaaaataactccgtttgattctttaaatcctgcactgatatgaaacagtcggatagtttcgctgctaagttctcaatcactggcaaaaccaaaacagcatttatagcccattgcacacattcgtgcagtagtttttttgaatatcctttagcacggaaaatttcttttataaaaattccttcaagacacccaattgggctaatttcagttccttcaaaataattatatcataattggcattgtgcaaatccgaccggtatcagttcttcaaaaacgaggaagataacagagtttttggggagagataatctatgaaacttcagttttcaaagattttattatatgattatctaaaagcattgcggtcaaatttgcctgtatatccaggcagatagagttgcatttctaatcattttaaaaagtcacctttcaaacgctttaagtgatatactattttttatcttttttatttttaatctcatcttttctggctctcagcatggcctcggttgcctctatttcttcttcagttttaagctgcggaataaaacttgacgcaacctttcccttgccacgtgttcttatgtagaaaaatccaaaaatagagaatattattgcgccgagacagttaaccaacatatctttcattgtatctattaagccaatatccaaatatgaaccggttatggcataatcctgcggaacaccgtttattgttcccgatatgaccgttttggtaatatcttttattatgatagggtcgtttaacccactggggttcagcaaaacagaggaaatgtttggaacataccagtctttttgcatgtcggtcagaaaaaactgatccattccatattcaaaaaactcccaaatgacgcctatagtcatggaaaagcaaaacgccacaaacgctacgaaaagaggagacatattgatatgaaagtgcggatcctggttaagaatatctatcatagcaaaacctatagcggccatcataaatccgtttatggtatgaaggattgtatcccaaagcggaattattgtatagaagctttgaatctctcctaaaatttcggcagaaaaaataaaaaacattattacggcctcaagagcaataggcagttttatatttaattttctgtccacaaatgatggaatcataaataaaatcaaggtcagtacgcatgtaaagacatttgcatagttttccataaagaactgtcttaccataaccaaaatgaccaaaatactaagtatagtatgaattatttttcttttatcccgcttctttttaagagatacgtcttcattattaattcttcgcataatctctccccttttgaaattacaaatatagtctaattatatcaagtttagtcatcaaagtcaattatatatattttactgccggtaaagataaattttaagacaaaatataactgtttacttttattgttccaaatgttataatttatttattaaattaatatgtttggtattatattagtatgtagatatattgggagggaaaggatatgaggcaaaagatacagaagaagatgtttgaattttgttatctgctggaacttttaatttcctgcgtgataggtatagcagttgtgattttaggcgtcagattattccttgagatgataaacctcagcgtgttcagcggcggggataaaatattagagactattcttgacaaggcaatgatacttgctatcggtgtagagtttataaaaatgctttgccggcatactcccgaaacagtggtggaagttcttttgtttgcgattgccagacagttggttttggttcataaatcagctttggatattcttattgaagtggcggccattgcagcgctatttgctataagaaaatatttattgaccaagcgcgatgagagggaaagcgttggtgatactggaaagtctaaattaaacttttttaagaaagaggaagaagagaacaaaaaagttgatattctatgataatttaaaatttcgcctggctgaatgtcaggcttttttattagatttattttgtgttttaaattataaatgggtgtcggcggagggcaagataattctatattttcgataatgatactgctgcttagcgatgtaaacaaggtttaaaaaataacattaatgtttgcatatttgaattattgacactataggaatatcaagcagcagtagttgccgcattgagttttttatgtgaactaaatagttgtgtaaaaacggcacgctatatattatagcgtgccgtttaatatttaaactgtatttattttttatttgccggtgcgataactttataaactaatgccgctaaaattcctccgaccagaggagcaacaatgaacacccaaacctgtgccataggcaggctctttcctgcaaacagcattataagcgccggtccgaaacttctcgctgggtttactgaagtgcctgtgaatggaatacctaagatatgtaccagcgtaagggtaagccctattactaaaccggcaacagcggcgttttctattttagacgtaacgccgataatagctatgacaaatacgaatgtcaggattacttcaaccaggaatgcctgccacatgcctatgccaagagcacttgcttcaccaaatccgttttgacccaaaccattctcggttcctaaaagtaaagctaaaattgcagctccggctataccgcctaaaaattgtgaaataagatatccgatataatcgtttaccgtcattttacctgaaaccagcataccggttgaaactgccgggttgatatgacagcctgatacgtttccgatagaatatgccatggcaacaattgataaaccaaaagcaaatgctatcagtaatgtagaaagcgccagcgcgctgccggtcataaccaaattggcgtcaccaatcagattgttggcagcaacagcgctgccgcagccaaagataaccaatacggccgttcctataaactcagacaaatactttctcattttacttcctcctctaaagttttatttattaatatatatttaacttacagatgatattataccatatttttctaagaaattcaataaaaaaagacggcaattcagccgtcttttgttaaatttgtattactttttattcaataatttcagcttttagtccaaaatgcttgaatgcggcttcgagctggttgtcaacaattactgtagtgttctgtagcgcgttatacaactctctttgtgttgttaagtcaagcacaccatatgggaagagctcctgattgttttgaaactgagctacagcgctttcaagttcgctgtcaaaatacgggtcattgatgtttccgttatacctgccccagacattcagtatctttttagctttggatatattagcatcgctttcgccgggattatatattctgctgtaatcaaagtcttcgtaacctgaataatcaaacggcacggaaccattctcaacaacggcgtcaggcgttattcctattttatcaatattttctccgctcggcgtcagataatatgcggcagtatatttcatagcttcgccgtcttttaatgagacgctgctctgaactgtccctttaccgtaagtttttgttccaatcaaaactccaacttcattttcttttattgcggccgccaaaatttcagaagcgctggcagagtattcatttaccaatacaactacgtcatttttctgagttctctcattgttagacttgtatgtaatatcaaaaagatcaactttgtggtcctcagtaacgattacgtttccattcggaacaaagtagtttgctacttttaccgcctgggttatataaccaccaccattatcgcggacgtctataataatattatttatattctgactgtcagcctccttaacggcagcgtcaaactggtctgatgtattgtccataaaaccatagatttttatatacataacattagctgaattctgttcgttttgttcatcgggagcggaaacaattttatacgccactgattgtttctcaccgatttcttctctggtcaaagtgaagtacaaaacgtcgtcgacaccttcacgtaaaactccgacggtcacaggggatccaacctgacctctgatatatttctgtgcaacttctatgctaacgccgagaagattgttgccgtcagcactgtagagtgtgtctcctgtcaggattccggctttagccgccggggaattttcgtatactgaacctactatcaggtttccgttcgattcattaaatgttattccaataccgcctacggctccctcaagctgtgaaataaactgttcaaattctccgcttttataaaatacggaatgctcgtctattgagcctaaaatcgcactcataacggtttcataaagttccggatgctgttttaatatctcgagcagtcctgctttatataatgacagttggttaacaccatccttagcatagacagaaagatagtctataacctgacttacgtaatcagatataaattccccgtcttgagactgatctgcaggagccgcagtcgaaacagctgtttcaggctcgtccgccgttacggttccgccaaatggtagaaccaaacaggaggccgctatcgcagcggctaacaatcttttgaaatttttcatattatacctcctaaaataataaggggcagaaagcccccataaaatttatattatattgtagttattgatactattctataaccgccgccggcaagagtggctactgtaacttttacattcatatccaaaaaccatgcaagggaactgaggtccagttcttcaccattgcttccgtttttgatattccctccaaaggcaggaatttcagtatattcaagctgtgcggcaatagcagtgttttcttcattcacaattacaggttttacatttttaagaacgattccctcatctttccagtcagataaaaacagaacaccggtatatgacgataggttcgttattatcttgttttcatcaaacgcaaaggccggcatggctgaaactattattaatgcggcaataagcagtcctgctgttagtttcttcataagcacctcctacattttttcaggggcagtaatcttaagcatattcagaaccccggcaataacttgtcttgtgcagtcaatcaatttcattctgcagtcacgcaggtcttcgtcctcaacgttaacacggcaggcattataaaacgtgtggaaagcggaagccaaatccataacataacgcgtcatttttgacggctccaaactttcagccgatattcttatctcctcaggcaaatcgctgagcttctttaataaatccagctcggtttcatcagttaaaagttcgggctttatttcggcgtaaggtttgacgttaattccctcttcactcagaaggctcagtattccgcaaatcctggcgtgcgcatactgaacataaaataccggattgtcattgctttgttcctttgcaaggctgaggtcaaaatccaaatggcttccggcgcctcgcatattaaagaaaaatctagccgcgtcaatgctaacgtcttctaagaggtcgttcagagttattgcctttccggtacgtttagacattctgacaatctctccgtcctgcataagacggacaagctgcataagcacaatttccagtctgccggaatcaattcctactgctgagagcgcgtttttcattctggcaacatggccgtgatggtcggctccccaaatatttatagcaaggtcaaaatttctggtttcaagcttgtttatatgataggcaatatctgcggcaaagtaagtaggtattccgttttggcggacaagaacctcattcttttccagtcccatcttttcacagttcagccaaacagcgccgtcttcatcataagtatatccgtttttgcgcagacgttcaattgcagacgttacctcgccgttcttgtgaagaaggctttctctgaaccacacgtcataattgattctatatttttccaagtcagttttgagtgctgatatatttttttccagtgcataatctatcaaagcctgcttgcgttcatcttcgccgcagtccaggtatttgtctccataaagctttataaactcttttgcgtgttcggttatgtctccgccctgataaccgtcttcagggaactcaactgcatcctcgccttttaactgctggatataacgggcactgagcgacttgccgaacttttcaatttggttgccggcgtcgtttatataaaattcacgcgttacatcatatccggcgtattcaagcacggaggccaaacagtcaccgagagctccgccgcgggcgttgcccatgtgcataggacctgtaggatttgcgctgacaaactcgaccatcacctttttgcctttgccgagatcaatctttccgtaatcactgccttctttttcgatagattccatagttctgtacagccagtcaggggcaaggtaaaagtttataaatccggctcctgcaacctcgatatcttttatatctccggacttgtcaatattcgaggttatagcgtctgcaatttttctaggcgcggttttgagctgttttgccaaaaccatggctatgttgcaggcaaaatctccgtgagatttgtccttaggcacctcaagtttagcaaggctgcttatatctatattttcatcggtttcaggcaaactgccgtttgatacggcctctttatagcctgcgctgattttttcgattatttcactttttataccgtctatgatactcattcggttttcccctttgtaatcgtatatagttttattattaaatattttccgccgacggttttctattaaattccgtttcgcatttcaacacagaaacatcagaaaaccggagcggacaactaattaatttcagattttgattccgtgacgctgtctgttctaactgtaaccgtcatattattctttataaaattttggttgtcggcgtctaaaagataattcatattgagagttccgccgttatcgccaaagtcaaaatttatattttcggtagttattgcggcgccgacttgtccatacggcgtatttatcagacagagacttttttcacctgtcagataattcatttttgaagtataacgtccgcttctgcgaacgctcacgttaccgtcgctgacttttatggtagtggtcgtatcttcaaaaccggtcatgtcgctttcatcataaattatatatattttattgtttctgatagcatatttgccgactgtatcgagagcaattgtctcctgctcaccgtctaactcctggtttgtgcgtatggatataactgcattgttttccatattttcacctctcagtatttttctatatcgatttttgcaacgtcgccctcaatttttttagagagaaaaaggcttccgagttcttcaaatccgtgaactgtgtcgctgacataatattttgaattgcccatatcattgctgccggacagaagtccgtgcatttccatcatcctcttagcttcaccggccgcagcggcgcctgaatcaatcaaggtcacgccgtccccaaccacatcttgtattgtctttttcagcagaggatagtgggtacagcccagtataatggtgtcaacatcattctttagcataacgtcaagatattcctccgcaagcattctcgctattttagaatcagaatatccattttctaccaccggaacaaacatagggcaagcattagatatgacttttatttcgggatttaagttcccgattttttcggaatattttccgctgtttattgttccgctggtgcctaaaactccaatacgtccgtttttggtagcattcactgccaattttgaggcaggttccaccactccgataatatcggtgtcgtattctgttgtgatatgcggaagggcggcgctgctggcggttccgcaggctatgactataaattttatatcaaattttcttaaaaaatttatgtcttgccgcacatattttactatagtagcggagcttcttgtgccgtacggaactcttccggtatcgccgaaataaattatgttttcattcggcattatcttcatgacctcgcggacacatgtaagacctcctagaccggagtcaaaaatacctattggtctattatccattatatatcaccttatttattgtttttgtctagggcgtaatttataaggttgtcaagcagttcaaagttgccgacaccgctcttttcccacattttagggtacatacttatggaagtaaagcctgggagagtgtttatttcgtttaatctgactgcaccgctctccttgtcaacaaaaaagtcaactctagacagaccgccgcattcgcatattttatacgctcttatcgcatagtctttgagtttggcttcaacgtctttggtcacattggcaggtatggttattttggaactgctgtcattatacttagcgtcaaaatcataaaactcattagccggagcaatctcaccaatattttcggcaaccatagggtctgtgtttcctatgaccgcgctttcaacctcgcttgcggcaacgaattcctcaatcaggactttactgtcatgttcaaaggcgagattcacaccttcgataagctcttctctgttatgcgccttgctgatacccacagatgagcctgcgtttgaaggttttataaaacaagggaagcccagtttttcttcaacattttttatccagttatcatttgaaatatccgaggttttgacggtaatccagtctgcttggggtatccctgcttctttaaacagaattttagccacgcatttgtccatacaaacagcgctgcctagaactcctgaaccaacatatgggattccggcaatttcaaataatccctgtattgttccgtcctcgccgtttttgccgtggagaacagggataataacgtctatttttatattttcaatgtctccattatttttaaatcttaaaagccctttatcgctgcgtgagggagaaaggatagccttgtcatattttccggccggcagagtggatatttcagacgtcggtttatcaaaatacatccagtttccttcagtatcaataaaaatcttatgtatattatatttggcagtatcaagagagtcaataaccgtagcggcggatatcttgctgatttcatgttcgcttgacacgccgccgaagatgacgcatatgtttaatttttccaaataaataaccttctttccaaaaagtttcatgttattgcggatttgacagccgcagcactaaatatctattttaacatatttcgcgataatttcaataggtataatttataaaaatatgttaaaaatctataacatgatataacttatggaagaataggaagtttattacattaaaattttaaagagcaaaagttttaggaggaagaattatgccaaaagtaaatttgatgagagtattcggagttatctgcgctgccgcgctggttcttgtcacagcagtttcttatatttcgtggcaggtcaacgatattgaggatagtgtgctcagattacatatcgttgcaaacagtgactcagatgaggatcaggcgcttaaacttaaggttagggatgaagtggtggaaagatgcggatttttgtttgaaaactgtgtttccgcggaacagtcaatcaaaaccgccgctgataatataggatttataaaatatgttgctgagcaggtcataaccgaaaatggttataattatgatgccgactgtcaggttacgcagtgctcttttcccacaaaacaatatgagcggccgggagacggagtggtatcacttcccagaggggaatataatgcgttaaacataaaaataggcgccgccaaagggaaaaattggtggtgtgttatgtatcctccgctatgctttgttgacggggttgcaagcgttccggatgagacggacgagcttttaaaatcccagctgactgcgtctgaatatgagctgataaccgagtcagaccgtccggaaataaaaataaagtttaaaattgcggaacttttaggcggacagcaggactgagccggcgttcataatatttaactattgatatttttcacccaatatgttataatttactatatttctgcggggtgatactgatgaaaaatattaaatacagactggcgaatttgttaggtcttaatactgacgcgtctttgtttgaaataaatcatgatgaaatacaaaaaacaaacctattgtttttgcagcagatttcttttacatcgggtttaattatgctgctgctttatcttgttagtttagttttgccgtctatagccgatttgagaatgacttattttatggaatttttagtttcggcaattatatttgttttaacctgcgtggcttttgacgcactgctgccgtattcgcttgtgctgacatattttttgacgtcggtgataatggcgtatggcgcgatagccgggatttatcaaactccggagggcactgcaacggcttttattgttttgatttcgtttttgccaatgcttatatttgataaacaatcccatgttctgcctttttcggtggttttatggctgcttttctgtggtgcgacatttatgcttaaagattttaaatattcttcatttgatatattgaattcttccgcagggcttttaatgggtatcttaataaacgctaagatatttaaaataagaataagcggaataaacagcagcaggattttggcaaggcagacacaggttgatgaactcacgggtctgcctaactataaaaagctgcttgaggatttgtcgggaaagaacgatacgaggattgcaaaatctctctgcagtttggctattattgatatagatatgtttaaagaatacaatacaaaatatggacgggaaatgggagataaatgtcttagaaaaataggtaattgtatgctgaagatttctgacccgggtgaacttatcgtctacaggtatggcggaacaagtcttgttgccgtcagtctcatacatgattataagggaatacagcgggtatgccagggcttgtccgtccttataaagggtcttaatattgagttccagggaaccgaggaagaaaagattacagtaagctgcggttataccgacgttgtggaatgcgagtgcgacgagtttgaaaagcttttggatatggcaggcgaagctttgcagcaggctcgcaaagacggaggaaactgcagcgtcggctacttacaggtaaaagcgcttaaggaaaattaatttataatatgcggaatataataacataatttgggtgaagctgtttgattcatatgaacttatttgttggggaattgaacagctttttgtgtatgaaaaaataatttaaaaagacagcgtttggttaaaaatgtatttaaaatagttgaaatttgtggtgttgctttttaataaatacaagttgtcttgaactctgttagttgtgtttttcatttaaaaattggaattatagttgtcgtttttaataatagaattctatattttagtaaatatttgttaaaggggggggttgttatgaaatttaaaaacctgtatactaatgaggtatataaagaaaagcaattgctggctgataattatgaaaaagttgttgatagtaataatgactttacaaaggttatacttaaaataggcggattttgcttttttatgctttttattacgtctatgtttataccatcatattacaatctgagaattgtatattttagcgtatttttgattttagcagctttttatcttttgattaaacttcgtgagaagtatgttgggatttggagcatttacgtcgttttcacagctgcggttgtatgtttcactctaacaggctcttttattaccccaaatgatattggggttatggttttggcgcttttacttacatttcctattattgtacttgataaatcaattagaataatacttactgagttttttttcttggtattttatattagcatgatttatttacataaagcgccgtcgctggttattgatgaaatagttaattcaattttttcttttgtgttaggagttaccttaggtgaatattttagaatcgtcagactaaaaaattttgagcttgaaaggcaagctcatattcgtgaaacgacagatgttcttacacagctttttaataagcgtaaactttttgatttttttattgaatatgagaatggtgtttataaagaaccagttacagctatgtcgatactggatattgatgactttaaactatataatgatacttacggacatcagaccggagatgattgccttagacaaatcgggttatgtttaaaaaaattagaagggatttatcatttaactttttatcgatacggaggtgaagagtttgtagcggttttacatgatcctgatattgcggatataagcagtgtgttcgaaaaaataaatcaagccgttcggaatttaaatatttcacattctgctgtaagtaaaggtgttgttactgttagtattggagtggtacctataaaatataactgtaaaccaaattttgagcaattgcttgataatgccgacaaagcgttgtattcagcaaaacgaaccggaaaagataagactgtaatattttgtgatgattttaatgaacctgatattcatggacattacagcaaagttcatacataaaagttaaaaatataagttataaaatgttttaaaaatgaaaattctgtaaatttacggttacatggtcaaatatatcaatagataactaagtataaatataaaaataactttatataaaaaatagaaaaatgatatatttaaagtataatataatagtcaagtgaatatttttataataaaatttgcggctgaaataaatttcagccgcagtttattaatttaggcgtttaataaatgtataagaattagagcgccgcagaggtttaatcgacctaataaagtatctttattttccaaataaaaaattggttcttattgttttgtttaatttatatagataaactatgatgctaaaactctaattattatttaataaaatctaaaatttatccgctgccggcatgtcttgctgtagtttttgcagagtaaagtccaataagtagatgacaaattataaaaagactcttgttagaaaaatagaaaataatctgaaatagtaagttttttaatttattttatatgaatatttgatgtacatgattaaaataacataacaaaaaccataataaaggattgtaaacaggcaattgacaacgcgtaggtatttgtaatacataataaaaatttggtaatactaatattcggttaacactttattacaaatcaagcaaaattgacacaaaataaaaaaaggtgatataatataagttaagctctgtacttattttaggaaaattctggagagtgcagaggtatatttattttgtgaaacttgtaaattcagagtattattcaacttaaatttatatatagaggatgaagagaatgattcagcatattaaaaacggtgtggatttcagattaattccagcacaaaagtttaaaacaaatgttatcagtgttttctttaatattccgctttcaaaaagcacagtgacaaaagcggctttgctgccgtctgtcatgaaaagaggaacagaaaagcacaaaaccatgaatgagatatcaaaatatctcgacgaattgtacagcgcaactttgcgcgccggtatcaggagcaagggcgacggcgaggttatatacttcactgttgagtatataagggataagtttataggtgagaacctgacccaaaagattgtggacttgctgaaagaatttatattctgtccgcttgcaggcgatgatggttttgttgaagagtatctaaacggagaaaaagaaaatttaaagaatgctattgaggggcttataaacgataaaaaggaatatgttgaggttaagtgccgtgaagctatgttcggaggcgagggttacggtatgtttgaagccggttttgctgaagaattgccgaatattacctccaaaaacttatatgatttttataagcatattataaacgatacaaaagtcgatatttttgccagcggagatttttcggacgaaactgtggaaatgctgaagacggagctcgccggagaatttgagcctagagattcaggctatgttaagactaaaatcgctgttccggaaggaaaagaaataaacagaatagttgaggaaatagcagttgttcagagtaagctttgtatcgggttaaagtgcggtatagaacctacaagcaaagaatattatgcgcttatgctcggcggatgtattttcggcggcagtccgttttcaaaactgtttaccaacgttcgtgaaaaattaagccttgcatattatgcttctgtgagaacagagaggtttaagagcacaatgtttatcagcagcggtattgaaactgataaatatcaggcggcctatgacgagatactggttcagtttaataagatgaaaagcggtgatataactgacagcgaggtagtgaattcaaagctgtatctgactaatggtttcaactccatgaaagacggtttgagaacaatggaagactattatctatctcaggccattatggataataagggcgagatagacgacctgatagaaatgaccaataaggttactaaagaagaaattgttgaagctttcaacaaggtagagatagatactgtgtattttcttaaaggctgtgcaagtgacggaggtgacgaataatgggcggatacaatattgaaagactgtatagcgagaacttagacgaggaaatgctttttgcaacgcacagcagcgggcttagagtttatgtgttcccgaaaaaggggttcagtaaatattacgctatttatggaacggactatggatcaaccgatagagagtttgttgttccgggagagaatcagaccactgtgatgcctgacggaatagctcattttcttgagcacaagatgtttgaacagcctgacggcagcaacgcatttgacagttttgcgctgacaggggcttccagcaatgcgtttacaagttttgacctgacagcttatttgttcagctgtactgataagttttatgagaatttggatattttaattgattttgtaaatcatccgtattttactaaggaaaatgttgagaaagaacaaggaataataggtcaggaaataaaaatgtatgacgacgatcctggctggagggtgttttttaacacgcttaccgcgctttttcataataaccctgtaaaaatagatattgccggaaccgttgatagtattgctgagattgacgatgacgttttatataaatgctataatactttttacaatcccggaaatatgattttggtgctggcaggagatatagaaattcaaaaggttttagagagccttgataagcatatcagttcagacagaaatttgggaatcatagaaagacctaaaattgctgagccggaaagccgtgtgaaagagtttactgagcagaagctggttgtatctcaaccaatgtttcagataggatttaaggatataactccttttaacggcggagaagagcttttgtgccgtgaaatttcaacagatataattttggatatactgttcggaaagagcagtgatttctatatggaattatacagcgatggattgatagacagcagttttggggctgaaaccgagcttgaaaagcgctatggcttcacaatgatcggcggagaatccaaagaccctaaagaggtctacagaagagttaaggagcatattaagaaagcgcaggatacgggactaagtcatgatgaaatagaaagggctaaaaaggttgcaaaggcttcgcttattaaagtgtttaacagtattgaggctatgggaaattcatttattcggcttctgtttaaaggggttaatcctttggagtatgcggcggctatagattccgttcccgatgtggcggtaaacgagcgccttaaaaaccactttgatttgtcaaactgtgttttgtcaacaattttgccggacgatagccaaaatgagggggagaaataatgataaacaatatttctttccccaatttggggcttgatttcagcataaaccgtgcggctttcagtataggaaatgttaatatctactggtatgggcttataatagcgctgggaatgattattgctcttgcttacggcatacgcgaatttaaaaggtgcggattaaagcaggacgaccttttaaatatgtttttgatttgcgtgccggttgctataatatgtgcaagactttattatgttattttcagctttgaccaataccgggacaatctgctgagtatttttgatattaggaacggcggtatagcagtttatggaagtttaataggcgccggtattgtggtgcttgtatattgtctgaaaaagaaaataaatttgggagcggttttggatattcttgctgtcggatttttgataggacaggcagtagggcgctggggcaattttgtaaacggtgaagcatttggaacggctacaacactgccttgggcaatgacgattgcgtccgacggggttacatatgcggagtctgtgcaccctacttttctttatgaatcattgtgggatttagccggggttatcatacttcttgtttacagaaaacataaagggtttaacggagagatatttttaggttacattctttggtatggtattggaagattttggatagaggggcttagaaccgattcgctatacctaggtccgcttagaatttctcaggttgttgctcttatgtcagttttcttggggcttgcaggaatagccgccgggcggtttttaaaacataagaatatcaaaatcagcgttggaaaaccgaaagggactgaaaagagcagtcttgaagaacccaaagacgataatgatgacatagatgagtaatattttttgcgttaaaaattattttatttatattattttatgggaggattatattatggaacaggatattcaagtattgagacagcggatggctgagttggttaaaaatgagaacctgaaatatgatgatatatataaaatgaaacttgagatggatgatataatcgacaaatactattttgaacagatttaacaaaagtgactgaaaactttcaaagcagctgaacactgcaaataatatagtaccagtaaaaattgtatgttcggcgcttatgttttgacagggatgctgactgatgtatttgaagattattaattacgataacgtcaaaaatacttgacagaaacagtgtaagtatttttaaatgatttcctattgacctgttgagactaatatgttaaacttgtattaagatagttattcgttctgaccacaagggtttgcccgcgtgaaaaggcgaaggataaatggctgtcatgcgtttttatgacaagtttacgtgcgtgcatgggcgccttttttgaataaatcaaataggtgacagaatcctttcgctttgcgggaggattttttattttgtaaagagggtgattaaaatggaaaatgtaaaaaaacttgaagatacaaggatagcgcttgttggaattattgtagaaaatcttgatatcactgataaaataaatcgtataatccatgattacagtgattatatagtcgggagaatgggtataccgtataaaaaccgcggtgttgctattataagtcttgtaattgacgccccggtgaatataatttcatccttgtcgggcaagctggggatgcttgatgacgtatctgtcaaggttcagtatacaaaagtataaaacacagtaaatttttataaggagataatattatggaaaactataagtatgatgtgaagtcatcaaaggcagaggaatttattaatgacggagagataaacgatacgctgaaatatgcctcagaaaataagacaaacagaacgctgattaaatcaataattgaaaaagcaagggaaagaaaggggctgaatcacagggaagccgctgttcttctggattgtgaactggaggacttaaaccaggagatgtttgagttagccagggagataaaacaaaagatatatggaaaccgcatagttatgtttgctccgctgtatctttcaaattattgcgttaacggttgtgtatactgcccgtatcatgcaaaaaataaaaccatatgccgcaaaaaactgacacaggaacaagtgagagcggaaacgatagcgttgcaggatatgggtcacaagcgtttagctttggaggccggagaggatccggtcaacaatccgcttgaatatatactggaatgtatagacaccatctacagcataaaacacaaaaatggcgctatacgcagagttaatgtgaatatagcggcgactaccgttgaaaattataagaggctgaaagacgccggaataggcacatacatattgtttcaggagacttataacaaagaaaactacttaaatcttcatcccaccggtcctaaacatgattatgcttatcatactgaggctatggacagagctatgcagggaggtattgatgacgtgggctgcggcgtgctgttcggattaaatttgtacagatatgactttgttggtcttctaatgcatgccgagcatcttgaggcagcttttggggtaggtccgcacactatcagtgttccgagaatctgtccggctgatgatattgatgttgaagacttttcaaacgctgtttcagatgagatattccaaaagataattgctgttattcgaattgccgtaccatataccggtatgattatttcaaccagagagagtcaaaagagccgtgaaaaagccctgcagcttggaatttcacaaataagcggagcgtcaagcaccagcgttgggggatatgtggagaaagaaactgacgaaaataacactgcccaatttgacaggagcgatacgagaacactggatgaggttcttaactggctgttggagcttggatatatacccagcttctgcactgcctgttatcgtcagggcagaacaggagaccgttttatgcctttggcaaaatcgggagttatacagaattgctgtcagcctaacgcacttttgacgcttaaagagtatcttgaggattatgcttcagaagataccaaaataaaaggcgacaaagttattgccgctgaagttaagaaaattccaaatgataaggttagagaaacaactattgattatttggataagattgttcatggaagccgagattttagattttaaattataaacagccgcattttgatattgcttcaaaagttagaataaaaatcgagcttttgaagttagttcatttgcggctgttttttgtattttataataaaaatatcgtgttaatggagaagtgttactgtgtgctttcaaatgttattatatgcactgactttttttattaaacctgaaatgttagtaaccccaattgagttgtgaatatgtaaaatgttaacttattccgacaaatctgcatcaacattaatatataattaaagcagattttttgctggttagacgcgcattctaggtaagttttaaaatttactctatgttcatatcacacgctcatctatatatgctaagtgtgtgatgacaattatagtatacagaattttgttaaggtttttttattcaatatcaaaaaattacttagttgtgataatatacatcccgctattttcatcttgaatctgcgcttcaagatgaaaagccttgaactttcccgttgactttgtaaactgcctcgaaaaaagatttctcgaattccggttgattacttatcgaaaaactgagttttcagtataaaaaatacacagaaatgaggattttcagtgaacctcggaaggtgtgaccccacctgacgggtgggtgtgatacaaagtgctttgttttatctagcctgcaatgtcaattgtggctacacttttgtttaaaagtgtatgctatataaaccatataatgtcatataaactataaacgccgataattaacttagttgtcatataataaataacttagttgtgatgtattgcaaacgtagtttgccgcgttaggtgggctattatctgaaaacgcagtgctcaatattatatactttccaggttgaaaaattattattgcgttacgtgaaaaaataaaattattctgttaacaaatataaatataataaaaaacaaagataattttatataaatcgaaaaatatttataccgttataaaaaatgtgtgtacgtcaatcctattttattgtttattttgttttttaaatcccattgcttttttagaattatgttattataatattatatgaaggctgaatcttttcatcattgaaaaaggtttggtttttcattttagtttaacaaatgtttgttagacggggaaagaggatgaatatgggaaaggattttattatagaaaatttaaaaaacgccggaaaaaatattaaagaaaattttaaatcttatacattggattttatttttatagtgttgtttatatcagtgtttcaaacagtatttggtcaggaaaataatatagtcggagttatattaactatattgatggcttcatcaatgatgagagatttgacttctacgcctttaaaacatttagtgattcaatcttcggttttggtggctatggcggtttctgcctgtttggtagtgattcttaacccgtggattgctcttataattaattttattatgataacgataatattatattcttttacatatgagtacgctagtaatctatattttccatatattttatcctacttgtttatgatttttattggacctgttaccttggaacagctgccgaaacgtgttttgagtatgctggcgggcgctctgtgtataatggcatatcagtttgttaaaggaagaaaacgggttgttgatacaacgagggattcgctgactgtaataatagacgaggctttggtttgtacccagtgtttgattgacggagccggtaaacctgcagatttagaagaggtccgcaaaaatttgtataagctttgtaaaatggtctatgagcgcagaaaaagggttttatgtgtgtctgacgccaactttgccatgatagacagtgccaggggattagaaaatctaatattggttttatatgaaatgaccggtccgataacgcctgacagaattgagattttaaagaaagttaaagaaaaacttaaggaattccgtgcatttgtgcagcgtgaagtgaattgcttaaaagatatggatttctctgattttgccggaagcaattcttcggcggagactgaagaaatttttaggtgcgtagaatatatagctatacatttaaaacgaatgacagatcctaaacgtcgggttaaataccgccgaactgttttatcgtttgcggtgcgtttaaaggcggcattaaatctgagtcctgttcgtgttgtgtatgcgcttagggttgcagttttgctctcagcggcaactttaatagttcagcttttaggactgccccatggaaagtggcttttgtttactattgcctcagtttctttgccatatgctgatgatgttgggaaaaaggcgagacagcgttttacagcaagcgttattggctgtgtaataggtatggcctcatatgctttagttccgtcagctgtcgggcgtacagctctcatgatgttttcgggatatatcagttactatttttcgggttataccggaacatttgcgtgttcaacaatcggcgctttgggcggggctgtctttatgaacggttttggctggtatgacgttgggagcatggctgtggttcgaatagtgtatattgcagtaggaattctagcagcagtggcagcaaaccgtttgatattgccatttagaaggtctgctgcaacaaaacagctctggaagaagtatgagaatacggttaaacttcttacggtgatatgtgaaagtgacgatgcagatacacaattgtattacagtttagtaatacagtcgcacctgcttgaggaaaaactgttggagaatgctattaatgaaaattggaatggtattgataatatgcttagcgagtgccgagctttggtgcgcagcgctcacaggaaaaattcttttggtactttgattgcaaataatctcagctagttattatataaacttccaatttttatttatactattggcggcggtttcaaagtgatattttagaattcccaaatcgatttttgagtaagcgccgccaaaagacttaacgctgacttctaaatcattgagtgaaaagaaaaatttttgccggttcattgctgttggtgccagcatagcggaatttactcctgctaaaaaccagtcggggatgttttcattataatcgcagactttttctatgggtttgtttttatgcggtttcccttgggtctgaccatagcctagagtgattacgcagaccagtttttcaccgtctccggcagtatagctgcttttctttttcttatatgttgcagctacccagcaggtattaagacccagctgttgagctttcagcactaagtgttctccgtaataacctattttttcatcaagattaacatctgatttgctcaccatggcaaaatagtttgtaacatttttgaacatgccgtagtgtgccgtaaaaccactgaaagcttccggttcattagtaatcagctgtatattgagattgcttttgtgattgcaaacttctacctcagactttagttcctctataatattatttgggataatttgattagtatattttctaactgaatgacggttatttattgcttctgaaatattcatgaatattacctcctttagccaattatacacatataaaaatgaatagtcaaaataattttttataggataaaatatgattttgtcaaatggacagattatttggtgtttttgttgttacaattgaacaacatatagaaatgttcataaaaaatcgcttgacatgaatttaacggtaacttataatactatcattagataaattcacataaagataaataccatataacctatatggtgtattatagaaatgaggaaaatgtaatgaatgaagaaaagaaaaaagctcttgaccttgcactgagtcatattgaaaaacaatatggatccggcgctgtaatgcgtcttggagaaaagcctgatgcaaatgttgaggcaatccctaccggggctttgtcacttgatattgcattgggaatcggcggaatacccagaggcaggattattgaaatatatggacctgaatcgtcaggtaagacaactgttgccctgcatgtggtagcacaggtgcagaaaatgggcggagaagcagcgtttatagacgccgaacatgctcttgaccctatttatgctgaggctttgggagttcagaccgatgacttgatagtttcacagccggataccggagaacaggccttagaaataaccgaacagcttgtaagaagcggtgcggttgatgtaatagttattgactctgttgcagcgcttgttcctaaagcagaaattgaagggcttatgggtgattctcatgtggggctccaggcacgactgatgtctcaggctctcagaaagctggcaggtattatttcgaaatctaatacaactgcaatttttataaatcagctgcgtgaaaaagttggggttatgtttggcaatcctgagactactaccggcggacgtgcgctgaaattctatgcttccgtaaggctcgatgtcagacgtatcgaaagtcttaaaggcgacggcggagttataggaaacagaacaagaataaaagtagttaaaaataaggttgctccaccgtttaaagaagctgaatttgatattatgtatggtgagggaatatcaagagaaggaaatatacttgacgttgccgttgatatggatatagttaaaaagagcggctcgtggttcagttataatgaggaaaggctgggacagggacgtgaaactgttaagtctattttaaaggataatcctgagcttgctgatgagatagaaaataagattcgtgaaagcgccggactgcctatgattggagaagaggcggagagcatgtttgacgaaaagcctgttgcaggattagaaaaaccaaagaagaaaaaataaattgttttgaaaacttctatttaggtaagtgataaaaatgatggatgagatattaaaagggaaaaaacttgctatgagatttctcgcttcaagaatgtatacctcaagagaaatctttgataaactgcgccgtaaaggttatagttcagaattggcggagagtatagtaagtgaacttatcagtgaaggttttttagatgacaaacattatgctgactgttatattgctgatggtgtaaacataggatacaaggggacttttcgtatcaggcaggaactcttgcgcaaaggcgtatcgtcttcaataattgaccgcgcgtttgatgaggctgatgttgacccggagaatgctttgcgtgaatttgtaaagcaaaggctgcaggttgctgatattactacaagaaaagagtatgaaaaattcagaaccatgctggcacgccgaggcttttcactcagtgagataagaaccgttttggatgagttcgatatagagttttacttagaggattagattgaaatttaaggagaaagccgatttgaaaaaaatatctatggcgtcgctcggatgctcaaaaaatcagatagacagcgaacaaatgctgtcaatacttgaagaagccggttatgagatttgtgagaatgaagaggatgcaaatattataatcgttaatacatgcacatttattgaggatgctcagcgagaatcgattgactgtattcttgagctttcacaatacaaaaattccggcaatgctgaattattgatagtaaccggctgtcttgcgcagcggtataaggagcagatattatctgagatacccgaggttgacgcggttataggaactaacgagtatgacagaatagccgaggttatagaaagctgcctgaacgaagacgataaacctgttaaatgttcggagaagccgcttctttgtgagcacgaaagggttcgtaccacccctggatatacagcttttttaaagatagccgagggctgtgataaccgttgtacatattgtgttataccatctatccgcggaaattatagaagccgtaaaattgaggacattttagatgaagctcataaaatggctgaggacggagttaaagaaattattgtaatagctcaggacacaactagatatggtattgatatttatgatgaatatgcccttccgaaacttctcagagagctttgcaggatagacgggatagaatgggtgaggattcattattgttatccggagcttgtgactgatgagctgattgatgttatagcagaagaaaacaaaatttgtaattatcttgatatacctattcagcatataaatgataaaattttaaagcggatgggacgaagaacaggtaaggaacaaatagttactttgttgagtaagctcaggaggagaatacccgatatagttataagaacatctcttatcgttggatttccgggagagagcgagtctgactttttggagctgaatgagtttgttgaaaaagctgaatttgacaggctcggcgtatttacttattcgagagaagaggatacgcctgcatataatcttcctgaccaggttgatgaagaagaaaaagtgcgccgccaagaaatgataatgtttacgcaggcagaaatagacgatatgaagaatcagaacaaaatcggaagtattgtcaaagtgcttgttgaagggcgtgatgaaataataaaaagttattacggcagaacttatgcagattccatggagatagacggaaaagtgttttttaaatcgggaagaaagcttaatgaaggcgattttgttgatgttaaagttgaacaggcaatggatatggatttatttggatctgaggtataacttgtgcaattaatgatttataaaattgttttgtggaggaaataatatgaacttacctaataaattaactttgcttagagtgatactgataccattgtttatgattttattcttgagctgcggcactgttggtttatatttagccttggtgacttttattttggcggctgtgactgatttttttgatggtcaaatagccagaagaacaaacagcattacaacatttggaaaacttatggatccaatggcggataaacttttgacactgggagcattagtttgttttttggctgcagatgtgccttatataaacgcatgggttttgataataattattgcaagagaattgattgtaaccggtatgcgtatgctggctcttgaacaaaacagggttatttcagccagcttctttggaaagcttaaaactgtttcacaatttgcaatgattattgtggtgctgataaatcaaatagtaatggttggaaaagatccattgcaggggggattcggcaattttcttgtaatgatattggttataatctctgtagtgctgactgttctttcagggatagattatgtatataaaaacagggaattgttaacgtttaagtaacggggatgttacatgaatgtaacatgtattgaaattttgagagttttatattaatgtgttagcgatagataggaatgagaatatgaatataatagtagacgcgatgggcggagacaacgccccggaagaaattgtaaagggctgtataatggcagcaaatgattttggtgaaattattacactggtaggaaaaaaggatataatcagcgaacatttaaaaaaggccggatataacggagataggataaagatacaaaatgctgaggaagtaataagcggagacgatgagccgactaccgcgataagacagaaaaaggattcgtctttaagggttgggcttgatatgctccataaaggtcagggagacgttatggtcagtgccgggaacaccggggctttgataaccggagccactctgatagtcaaaagaataaagggagtaagacgcgtggctttggcgcctctaatgccggctgaaacaggctgttttttgttggtcgacggaggagctaatgttgagtcaagcgcggcattcttaaaacagtttgcaataatgggttctatatatatggagaaaattatgcatattaagaatccaagagtaggattagttaatataggttctgaagaagaaaagggaaccgaggatgttacagaagcaaacaggcttttgaaagaaataccgataaactatactggatatattgagggccgtgaaattccatgcggagcggttgacgttgtagtgtgtgatggatttacaggaaatgtaattttaaagtttatggaaggtatgggaatagtaataaaacgaatgttgaagggtatttttttcaaaaaccttaaaactaagattgcggctcttatggttaagggcggaattaatgagcttggtaaaactcttgattatactgaatacggtggagctccgcttttaggatgtacaaagccggtagtaaaggcgcatgggagttctaatgcgaaagcgttttatcatgcaatcagacagtctatagatatggtgaacaataatctagtggacactatttctgaaaatataaataaatattgatttaaagggatggattgatgcttcggcatagaatagtgttaaaaaatctatgctgtgaaaatattataggaaaggcaatgatgatatgagtaaaaagcatgcaaaaattgtgggcgtaggcagatatctgcccgataagatacttgataacgcttattttgagggtatagtcgaaaccagtgatgaatggattctgcaaagagttggtataaaagaacgccgaatgagtgatgaaaatacatttgcttctgatcttgcggcaaaggcggcagaaaatgccttaaaagacgccggcatggatgcgagtgagattgaccttattgttatggcttcggtgtcgccggagatgtatacgccgtcaggcgcatgtattgtgcaaagtaagataggtgccaagaatgctgcggcctttgatgtgaatgcggcgtgcccggggtttattttcgccattactgtcgctactcagtttgttgaaaacggagtttataaaaatgtgttagttatcggagcggatactctgacgaaaattactgaatataaagacagaagcacatgcgttttgtttggagacggcgcaggcgctgcaattttgcaggctactgatgaagagacaggggtcttgggttcagttttaggtgctgacggcgacgcaggggacgttttaactgtgtgtggattaaaagtttctgagcttgataaagagagacgtccgtttggaaactacagaactatttggatggacgggcagttggtatataagtttgctgtgaagacaatggtaagttcgacaatagaagtggttgaaaatgctgggtatacgattgatgatatagatttggttattcctcaccaagcgaatcaaaggataatacaaagtgccagaaagaggctgggtcttgatgaaagccgagtattttccaatgttgagcagtttggaaatatgtctgccgcatgtatcccggtagctttgtgtcaggctatagaggaaggcagaataaaaaaaggtcaaaaattggttatagtgagtatgggcggcggtcttacatggggcagtgtgcttattgaattgtaaacatgttctttaggaggaaaatatgaacagaatttgtgaattacttggtatagagtatccgattatacagggtggtatggcttgggtggccactgctgaacttgcggcggctgtgtcaaatgccggaggtttgggattgattgcggctggcggtgcgcctgctgacgtggtcagagagcagattaagaaagccagaaccttaacagataagccgtttggcgttaatgttatgctgatgtctccgttttccgatgaggtaatggaagtggttatagaagaaaagccggcagttgttgccacgggagcaggtaacccgggcaagtacatagaaagactgaaggaagccggaattaaaattatgccggttatagcgagcgtagctatggctaaaagaatggaaaaagcgggagctgacgcggtaatagctgaaggaaccgaagcaggaggccacattggtgagctaaccaccatggttctcacaccgcaggttgtggacgcggtttctattccggttgtgtctgccggcggatatgctgacagcagaggtactaaggcagcgtttgctttgggcgcagacggtatacaggttgggactagatttatttgttcaactgaatgtattgcacatgaaaattacaaaaatgctgttttaaaggccaaagacagagacgctgttgttaccggacgttcaaccggagcacctgtcagagctttgaaaaataagctgaccaaagaatatcagagacttgaaaaagaaggagcttctgccgaggagatagaagaacttggagtaggcggtttaagacgcgcctttcaagacggtgatattgaaaacggttctcttatggcagggcaaagcgcggctatggtgcatgagatacagccatgtgctgagatagttaaagattattttaaggatgttgaattttaaatatattgttgtatattagatagagttattgttttacatatgcggtcttatccggctcacggtaagaaacgcggtcttataacaatgtgagccagaaaggctatgataaatatgaaaacagcatttttattttcaggacagggagcacaggctattggaatgggtaaagagctttgtgagaactttcctgtagctgacgaggtttttaacagcgcaagcgaagctttgggatttgatataaaggatatggtttggaacggtgataaggacactttaatgataactgagaatacacagccggccatcttgactatgtctgtggcggctttaagagtggctgaaagtttaggtcttacaccagatgttgttgccggacttagtcttggagaatacactgctcacgtagcttcaggaagcatggagtttacggacgcggttaagcttgttaagaagagaggcaagtatatgcaggaggaagttcctttgggagtaggcgcaatggctgcgataattgcgttaacgcctgaggatgtaaaagaaatatgtaagcaggcttcaagcaaaggaatatgtgagccggcaaactttaactgtccgggacagattaccgtggccggtgaggttgcggctgttgaatacgcgtgtgaacttgcaaaggaaaaaggcgctaagcgcgctatgctaatgcctgtttcagcgccgtttcactgcagtatgttaaagggcgccggagagaaacttgaaaaagaacttgaaaatgtcactgtatctgaaatgaatgttccaataattaccaatgtgacaggtgattacataaagagcaaggatgaaataaaagagcttttggttcgtcaggtttcaagctcagtattatttgaagaaagtttaaaaagaatgatagctgacggagtagatacatttattgaaataggacccggaaaggctctgagcggttttgtaaagagaatagataagactaaaactattttaaatattgaagatatggcgtcattagaaaagacaaaagaggcattaagcttataataaaggttctgttttttcagatagagttagataaatattttttgaaaagtttgactgccaattataattaacaatcggaggtagtgaaagtggagtttaaggataagtgtgttatagttaccggaagtgccagaggaataggcagagaaatagctcttaagtttggcgctgagggtgcaaatgtagtcgtgtttgatataaatatagacggccaggctgaaaccgctcaggcggtatgtgatgaaataaaagcattgggaggagacgctaaatacatattgggtgatgtctcaaaaccggatgatactgacgcactgataaagtttgcaaaggatgaatttggaagcgttgatgttatagtcaataatgcaggtataacaagggataatcttattatgcgaatgagcgagtctgattgggacgctgttcttactgttaacttgaagggagcgtttaatgttattaaatcagctacacgtactttaatgaagcaaagaaacggcgttataataaatatggcgtctgtatccggcgtgacaggcaacgcaggtcaggctaattattcagcttctaaggctggcttaataggtcttactaaatctgttgccaaagagcttgcttcgcgtaatatacgctgtaatgcaattgctccaggatttatcagaacacctatgactgataagctcagtgaggatatacagcagtcttacaaagattctattccgcttaaaaaatttggacaagttgaggatatagctaatttagcagtattccttggcagtgacaaatcagaatatattacaggtcaagtaataaatgttgacggcggacttgtaatgtgatataactatttatagtaaaaataaatttatataaataaaaatgaaattttattttggaggagaattgaaatggaaatttttgaaaaagtaaaggaaatcacagtcgatcagctcggagtatcagaggacgctgtaactatggaagcatcatttattgatgatttggaagcagattctcttgacattgttgaattaatgatggctcttgaagaagaattcgacatagagattcctgatgaggatgctgaaaagattacagcggttaaagatgctgttgaatacattaaagaacatcaagactaattatgcaataggctggactgcggagattaaaaaatctccgcgggtttccagactcggtatgaattatatagaagtttgcatccggcttgatgttatgcggtgcaagtctctatatgatttgaccgtgtctaaatcgtatttgattttgttttcctgcatatttttgcgggcaatggttatttattttgatgctgtgcatcggattgaaataggaggataaatatgaatagagtggttgtaacaggcgttgggggagttaccccggttggtataggcagagaagaaatttgggaaaatattaaaaacggtgtatcaggcattggcactattacaagatttgacccaacagattttgcatgtcatgttggagctgaggtcaaagactttcaggttacagattatattgataaaaaagaagctaagcgtatggacttgtttgtacagtatgcggttgccggagctaaaatggctattgaggacgcaaaacttgatatggacagtgaagacccaactagagtaggcgttatggttggatccggaatcggcggaataaacaccttatgtgaacagcataaaagaatgcttgagaaggggccgggaaaggtttctccatttatgataccgatgatgatttcaaatatggccgtaggtcaaattggaattatgtttaattgtaaaggtattaatatgactactgtttctgcgtgtgcttccggaactgattctattggtcatgcaatgcttgccgttcagcgcggagacgctgacgttataatagcgggcggagctgaggctactataaatgaacttgctttggccggattttcatcaatgaaggctttaacaaccaggaacgatatacctgagaaagcatgttcaccttttgacgctaatcgagatggttttattatgggcgaaggcagtggtattcttataatcgaaagtttggaacatgcgcttcagagaggagctaacataatagcagaacttgttggatatggctcaacgaatgacgcatatcatatgacggctcctgctcctgaaggtgaaggcggtgcaaggtgtttagcactggctgtcaaagacgccggaataaaacctgaagatattgactatataaatgctcatggaacatcaacaccttataatgataagtttgaaactgcagcaattaagactgtttttggggatcatgcatataagctggctgtaagctcaaccaaatccatgacgggacatatgcttggcgctgccggcggagttgagggaataattacagcacttgctgttaaagacgactatttgccgcctacgattaatctcgaaacccctgaccctgaatgtgatttggactatgttcctaataagggcagaaagtctgaaataaattatgctatatcgaattcattaggatttggcggacataatgcttctatcgtgtttaagaagtatactgattagtaaatacataatatcaggtcgggagggtcaatcctcccgatttttatatgacaaagattaagaggttatttatatggtgattataataggaggagcgagccatagcggaaaaacttttttatctaaaaagctaattgaaaagtataaaattccctgcactagcttagaccacataaaaatgggattgatacgcggttttaatgactgcggtttttcagcagttgacagcgatgagacaatagcagaaaagatgtggggatttatagaaggtttcatcagaacctgtattgaaaataatcaaaatacaattttggaaggctgctattttccgtgtgaaaaggttaaaaaacttttatgtgatgatttaactgttgtttttattgtattgtcaaaacaatatattattgaaaactttgataagataataaaatacgaaaagatagtagaagatagaaaattcccggagagcagagaaattaaattttttattaatgaaaatgagagactaaaggaagagtgtattaaatatgaacttccatattttgagataaccggtaattatttcgaaggactagaaaagatacttgaatatattaaaagtaaagcggttaaaatttgccgttattcacataatgatattaatgaaatatgtagtatgttttgcgataccgtgaaacatatcaacaaaagagattataccgcagaacagattgccgcttggatgggcggtatagataaagataagtgggacaaatcattatctgagcatttttctttagaagtaaaggtaatggggaagattgccgcgtttggagatatagacggagaatatttggatagactgtatgttcataaagactttcagggattgggatacggaaaaatcattttgattcactcgaagagcaagctatacagtcaggatttaaaaggatttggacatgtgcgtctataactgcaaaaggtttttttgagaaatatggttataaagtgataaaacgtcaacaagttgaaagaaaagatgttttattgaccaattatgttatggaaaagcattttgaacaggagtatagcaatggaatataattataaatttaaaaataaaaaactatttgatttggcaatgacgcatatttcacttgccaatgaccttcatatagaaagcaatcagcggcttgaatttttaggtgacagcgttctctcgtttgtggttgctacttatatttataatgaatataagaaggtggacgagggagtattgacagaacttcgcgcaaatgcagtgtgtgaaaagactttggctattgctgccagaaatcttaaacttggagaggatttaaagtttggaaagtctgaacgtatgtcaggcggaaaggataaagattccgttttggctgacgcatatgaggcgttattggcggctatttatttagacagtggaatagaaagcgcaaaagactttattatggatacaataggcagcatgataggcgatacttcttatgttgaactggaaaactataagtctgaaatacaaagttattatcaaaagcgtgatagaaacagagaagttgttaagtatcgtttggtaaataaaaatggacctgaccatgacccgacgttttttgtggaagcgctgtaccgtgatgaagtaatcggcaaaggcgagggaaaaaaccgaaaaagcgcagagcaggaagccgcaaaagctgcgcttgctaaggttaagggaagtaaggaatagctatgcgaaaatataatatacctatttttattcctcatgaaggatgcggacatgattgtgtgttctgcaatcaaagaaagataacagggattcaaagttcggtttctcctgataaagctaaagaggaaatagctcggtatctttcaacaataaaatctgaagattgtcagattgaaatagcctactttggaggaagttttaccggtcttgatatggagctgcagcgagaattcttggaggcagcttcgggatttaaagacgaacggataatcggaataagaatgtctaccaggcctgactatataaataaagaaattttagagcaatgtgtggagtttggagttaaaacaattgagctgggagttcagtcagccagtgacagagttatcgaactgaacagaagagggcatgtttttgaagatgtaattcgtgcggcggaaatgataaaatcattcgggatagaacttgggcttcagatgatgctgggaatgtatggctcagatccggaaactgatattgaaacatgcaggaaaattatagagcttgaacccaaatgcacacggatatatcctactctagtgcttagcggaacagcgcttgaaagtttatacagctgcggcgaatacataccatatactcttgaaactgctgtcagcactgcgaaaaggtgtttgctgatgtttaggaaagcaggagtagaggttattagaattgggctttatccgggagaagatttaagaagcgaggggaatattgtggcaggcccttttcactctgcatttggggaacttgttgaaaacgctgtatacaaggataaaattgaggaagagattatacagaagagattaaaggactgtgattatgagataatagcgctgtcttcagagacatcaaaaataattggacagaaaaagtgcaataaggagtatttttttaaaaaatacggagttagaataaaagtaaaaaaccggttagggtgaaattatgcttgagatggagatgaaagacgcctttttttggtatttggattcaaaatatgagaaagtaagagttatagaggaaaaggtaatagggaaatcgcgtgcggatgttgttgcggttttaccggatagaataatagggtatgaacttaaaagtgacagcgacagttatcagcgacttttaacacaggttaaagactatgataaattttttgatttcaattacttagtggttggagaaagtcataaaaaacatgctggtgaacatgtgccggaacactggggtattgtgacagtatcaaaggatacgggagtaaatattatgcgcgaggccgaacataacaaaaaagctaaaatgcgctggcagctgtcattgctgtggaggagcgaacttctaaacattcagctcgagaacggactgcataaatacagtcaaaaaagcaaatattttgttataaaatatttaatggaaaatgttgaaactgaaaaattaaagcgtcagatttgcaatgaactttttgagagagactatacattgctgtcagaataataagatttatattaaacaggataggttatataacctatcctgttttaatattagtattttaaagtagtttatttaaactctttgcctacagcaaattttatcattgcaataaaggctgaataatctttactgtcacttactttggtaaaataaccaattgtaccgcggctgttagtattgataaagcagaagaaccaagagtctgttgtcagaaaatctccttccatagtataacattgacggttgtctgaagaatcagctgtaagagcgacgcatttgcattcaatactgtaggtactgtcagcgtctttgaatatgataactgctgctttagttgaattattaatactttctattttaatttcttcgactatatcttcaaaatctaaatctgccttagtaataatatttttatatgcgttatacattacatctaaatcgggagcatcttctaaaaatgtattatcaattatgtaagttgattcggattccagctgaatgttaagaatagcacgttctattgccaaataccattcattttttatagtgttctttaactcttccggtttttcgtttagatagttataaaaattatttgtattataaagtaaatatggaagcaatgtctgttcatatgaatatctcaaattttctgctgagtcttttagctttttcatgtcagagtcagttaattcacttgctttaatagacccttcagttgaagtgccaggcgttggtttagtaactgcagcagaagtcggttcgggaattggtgaaggagtgttttcagatattatagctgtgggaaccggagctgttccggttataataacttgctgtgtttcttctatccagtctacagctgcatcaaggctttctgaaacggctcgaataggtactaaggttctatcttctatcattctggcgggcacatctaaaattatggattcctcatttttgtacattatattgctgtctatagttattttaatcgtattgacatcttttacagctattgcggtttgtgttgtttcatcccaagttactgttgctcccaaagcttcaaatatagcacgcattggaaccaaagttctgtcattttcggtgacaggatcaacatcaaaattaatttgttctccgtcaacaaaaacagttattacatcagtggatgcaaaaatctgaaatgacattactgccgtaaacagtgcgaaaattactgcagcgacagaaatttttttaaaattctttttcataataatccctccgtttatagtttattatattataaatgaaatgtaatattttgtcaaatattgtaatttaatttaaaaataataaaaatagtatagaataaattttaaatataacttaaatataatattaataagaaatgtgtttctgataaatcttaatccttattcttgtcaaatgaattttgaatttaagttgaattaactttatcggtatggtacaatttagtaaatagaatcgtgttcttaatttataaattataagtatttaagactcttataaattgttttataagaaaggtggagggagctatgcgaaaaaggggagtattattattttgtataataattttttccatagtatgtactgccgtcctgcctgtgtgggctgacggtgaaaaagtgcttgcttttcccggggctgagggcggaggaaaatatgcaatgggagctcgtgcctcagaaaacccggaagtttaccatgttaccactttggaaagtacaggtccggggtctcttacagaggctgtttcaaagagcaacagaatagttgtgtttgacgtcggcggtacgatttcttatgataaatggaaacagctccgtatagaaagcaatacaactattttggggcagactgcgccgggggaagggattacaattgaaggcactgatttaagtgatttcgccgggaagtcaaacataataatacgatatttaaaaataagacccggtgatagattggaaaaagaggtagacggcatatcaatgcagtatataagcgacgttataatagatcattgcagtgtaagctgggctgttgatgagcttgtctcggtttattcaggaagttccgaaaatcaaagatatgagcttggaaaaaatgttactgttcagaattgtttgatgagcgaagcacttaatctttcccgtcaccaaaaaggcgagcatggttatgggtcaatttttggaacagataattccacgctttaccataatgtttatgctcacaacaagtcccgcaatccggctatataccgtgaaattcagaatgttaatgtagccaataatgttatttacgactggggcgggacagcttcgtatggggggcagcctcattcaataaactatttgacttttaagccgtgtacagtgaattatgtaaataacttttatagatggggaccaagctcaggtgcggaggttcgaaatgttttttacaatattgaaaacgagactccggatatatcaaagtcaagtttctatttcagcggaaacgtaattgatggagttgatactattactaatgataatcttatcggagttacaaatctgaacaacgctgtgatcctggataaaccgattgatttgggtgagtatgaagtgccgcaggagactgcttttgatacatataattctatacttgatactgtgggcgcttcaattccaaaaagagatgctatagacgcaaaggttataaccgatataaaaaacgggacaggacatattattaattctccaaaagaagttggagggtatataaattccgaacctgtgtatagacgttttgagatttctcaggactggaaagagaaaaatggaatgggcagttatgcagaaagtgatattgtttcggaaggaaaatggaaaggttatacttggattgaagcatacgtatataatatggatgagatgagcgggaggcctacaaatcctgatgttgttgtacagtctcctgcaatagcagcgaatcaggataaggttatgggactaacagttgataaaggtgaatggaaagttataaatgaaggtgaatcgtttaattattcagcagttgcctttcctaaatcaggcactcaaataacaaaaattgagctttacgatggtgatatgcttatagatacagttgagtcggataagatagaggttgatatttttccgtcaagcggcgttcattattatacctgccgtgcgtataacggtaaaaatgagtctgcaaactcagcaacggcgattgtttgcgtaaatcctgccggagtagtgcctgaagaatttaaatatgaggttttaggaaccaaatggtataaggaatctgctggagcgtctatggatgagaacggtattatcacggtaggaggttcaggcagaataaaatctaagaacagctgcggatttttataccgcgctgtcagcggagatttctcggcggttgtaaaagttgaggatattcctaggtataaagacagaataagagctggacttatgctgacagataagcctgctgataattcaaaacttgctatgatttctgacaatttggacagaatgggtgagaatatttctattattactagaaaagttgaaaaagagaatatagctcaagtttatatgcgtaataaaaatggcatggaaatttcaaattcaaattcagattataatactcagcttgaccagtataggatacctgaatatttgcgcatagagcgccgagacaacctaataaaattttcagtatctgatgacggagctgattggactaacaatccgaggcagccatatgagataatgtttgagtctctgcctgaaacattgtatgttggtttaggagttgagtctaatccgggaacatacccaaaacctctctattcaatggcaaagttcagcaattttaaaattatagaatataataagcttgctgaaactgaacgctgggaaattgaagatcttagagataatgttgtaagcatatcaaataagttgaacgagggtgaaataacgcctgacggaaaacatattaatgtttatgcagctgtgtatgatgatacggaatccggatgccttcttaaccagtgtgctgtaggttcgtttactacagacaaaaacttaaataaatacgatgttcagcttgataccgggagcggaatattagatattagtaaaacaaagttgtttttgtgggatgacaatatgagacctgttcagctttttcaacaacaggattcttaatagattaaaagcacttaaaaaacttatttattgattttgagcgttatattttggtttataaaatcttaatttattgaccggattatggaacagttgtaaaatatattaaaaggggaagtttgtatgaggccaaaaagaatcggaggggtaaacccagctattcaattaataatggcagtatttctgctggtagtcggaattcttatgataacggcgcctgagtcttttattcgatggctttttctaattgtatctgttggcatggcagcttttgggtttatgtctttgatttcggctgtatttggaaaaaatggaactagacttggatcgcttatttcaggtatattgtatatagtaatcagtatagttattttaactcaaaaagatttttttcaagccgctgtcagcagaatttttagtttgctggcactggtgcaggcggttacaaatttaataagcggctttctgctttataatgataaagtgtccggatatataagaaagtttttttggggtatagtggcgtttggattttctgtattgttgttctttgacccacttggtcatattagggcagtcgaacttatttcagggatttatctgatagtttttgctgtatcaatggcattggagtgtatagatagttttcttgaaactgattatgcaaataaaaaggtaaagcccaaaatatctcttgcattaccaatagtttttgcggcttttattccgtcaagagcccttaaatatataaatgataagctggaatccggacagatggaaaaggcaaagttttcaaagcctgaagacagttatggcaagttagaaatttttatacacttaaaacagggattgatagaaggttttggacattgtgatttctgttttgacggaacggtgtactcctatggctgttacgaccagcactcgcagaagatgggcggttttatctccggcggaacagcttctttaacaaaaagagagccatatattgagcattgtatgagctatgaagaaaaaatgctggtgggattttcgctggaactgggccgagatgattatatgaatcttaaacgtgagatagataggatgctaaaacaaactgaagtctgggaaagcgacctccaaatcgcagaaaaagagggccggccggcggaggaacagaaaaagtgcaatgatccggcaagcgagctttaccgggcttccggtgcttcatttgttaagtttattgatggacaatataaaacttattttgcattaggctctaattgtgttatgtttacatacgatattatgaaaaatgcagggcttgatagtttggctttcagcggagctatcacgccgggaacgtatatggctcatcttcaggatttgtatgaaatgaaaaacacaatagttactgatatgcacgtatatagttatggtaaaacaaaaaactgattttttataggacaaagttacttttttatgacaaatttatatattttatttacataattgcaaaaatgagatatactactatatatagtggtctgaatggacggattttgatgtttttacaatggattgtggctgcttttgattaatatttaaggagggctgtgtatgcgttgcatgtattgcggacatatagacagtaaggttgtggattcccggtcaacagatgatggcacggcaataagaaggcgaagggaatgtttaaactgcggcaagcgttttactacatacgaaaagattgaaagtgttcctataatagttgttaaaaaagataaatcaagacaaagttttgatagggaaaagctggaacgtggaattttgaatgcctgtgccagccgcccggtgcctcttcagactattgattctatgattagcgacatagagagcgcgcttcataatactttgcaaagagaagtttcaagtgaaaaaatcggtgaaatggtaatggagcgtctcagagatattgacgaggttgcttatgttagatttgcgtcggtttataagcaatttaaagatattgaaacctttcaggaggagcttaaaaaactttctcagaacaagaattgatatattgatttaacataagcagtatggtgaaaattatatattttgataaagcctgagtgaaatttactttataacattcaggtttttttgtttgttttattgtaattataatatatatttatgttttttaggaaatttactgattgactaatcgtatacaaaaatgctataatacattatatatataatagattgaaaggtgatggatggaatgaaaaagaaaagtatgagttttatttgcactttattttgtttattattggggattgttatattccttggtatgtctttatgcgtatatgctgaaggcagccgtgatttaataaacagcgctgcaggtcagggggatagagcgtacatagagtatcagggagacaatatgctgagtgttggacttcagcggcagcaatatgtaaacgtatatatgttttccggtgagacagcatattttggcagcagtgttgctaaagcaggttcaattgaggtgacagacccaaaaggtgagaccgtattatatgatgttaacgcggcgggaaatggatttataggaagcataactagtgaggcggcaggtccgaattataatggtttaatttctggcggatataatcctatttcatttgttgctgatagaaacggtatatataaatttatattttacagcagcaattatagttcttcaaaacctaataattctactaatcctacagcaacaaaagtttctgacgataattttgttgctaatcaaaaagacgccgctataggagcatgggatgttaccgttgttgggacagcgggagacggtactgctgaagtaaagaccggcagaatgtatgccgactatttgtcgttaaacatgggggcaaatgagcgtagcctatattcaaaagtctatgttttaacatctgatggatatatatattatacagactttaacggaatagacccgtttgggtttacatttttcggaaataacagaggtcttgtatcatccagaaccaatatgtcgctttatcattcaatggaggatgcgatcacaagcggtaatacaccggacctgaataattttagagatataaccgacaaaaatggagcaaaggacggaatgtatctgccgggacccggcaatacgtcgacccagcttgattcctcgtttaaaatattttttaacgaaccaagcggtgagcttcctgatagtataaagccggcgcctcagccgcctggaactattgattatttaaaatttgaaggaagcgtgttagactcaaatggaaatataatcgaaaatgaaggctatgtcggcggcggtggatattttattataaatgccagcaaagtttcaaactttgaggttaaaattgatttgagcaatatatattataagacaaatacagaaggaaaaatagacgaaaataattttatatatgaatatcccgtgggcagcggaaattatatgagtatgaaagatgactctacggttgttattgataatatatcagaatatattaatgcgggtacagtagtaatcggaaactcttgtgtagaggggataaacagaatattctggaatggctgtgatgaaaacggacgtgttcttcctgccggaacttactttgaggcgggaaagggaaacgcggtggcgattccaaaagccggagaatatcacttccctctgatagatgttgaaaacttgccgaatggtctaaagattacccggctgaatactccggatacctttagtaaagaatagagagattttgtagataatcataaatcttatctatattataacaacattgaaaacagtgtgttgagaaccggaaattataatggcgttgaccgccaaaaaatctggactgttgcggataagcttaataaacgttccggtgtgaacacggaggcgagcggcgcctgcattgtgacaggcaggagtgctgataaaacagtgcttgatttttggacagacttgcgattgtctgatgatgccggaaccaagagtaatcctgttgaattaatagacagaaccgacagtgttgagagcatgcttcttgcaggatttacattctttgattatgacttcagcggaacttatgatatgttgacaaacgactatgctctgtcaaatgtcaaggtcgaacttctggacaataatggaaacagtattgcggagacggtttctgattccagaggtttttatacctttgttgttccggataagtcggcccaatatacaataaaagtaactcttccgaatgatacatatttctgtacaaccgcaaatatggaacaaagtactgttcctcaagatatagtggttgggcaaaccgcttcggttgaagacgttggttttctggctagagaggcaagcccgattcgtataaataaaacctgggcagtgccggatgaagaacagccaaaaatggatgtagaatttttgattgaaggccgggatcaaaatggggacgaaaattcaccggtgctttattcaagaactgcagttgtaaaggattctgagggatattcaactttggttgaaggtcttccggctgtaatatttgttaatgaaaacgaggtagacttaagctatactgttaaagaagtgacagatataccgggatttaccggcactataacttctgagaccggcggtcttgtatgggattgtgtgaataaacctgaggatattagttttactgttgaaaagacttggtcagtcgcatcgaattttactaaaccggatgatataactgtcagtttgatgaagaaaaatgaaaaaggtgagttagtaaaagttgatggtgttcaggatcagcctcttaataattcaaataactggaaagcgacttttgagccggttccaaagtatgaggaatacgttgaaaatggggcagccaaatacagagcaatagactatactgttgttgagaacaatataccaagcggatttgcagcgtctatacaaaagtctgctatagaaacaaaaacaaatacttttattgtaactaatactgctgaaggttcagttaaactaataaaagtagataaggaaacatcttcacctctgcctggagccgagtttaaattggtgcagcttgatgaagacggtattagttatcttgacgttaataaattaaagccggtatatgattctttaaatgaaatcgaaaagtatcaatacgatgaaaattcaactatcgataaattagttacaaataaaaatggtgaaattattgtagaaaatttatctatgggaacatataatttcattgagacaaaggctcctgagggatatattactcctgcagaaaatgaggcgaagtcaagtgatatggttcttggcagcggagtaaattcatctcaagtgaaaatggaaaactctttaaatatcactccaactccgatacctacagcaacatcggcaccgacagaaactccaatgccaacggcaacagcgacacctgagccaacagcaacggcgacaccggttccaacggcaacagcgacacctgagccaacagcaacggcgacaccggttccaacggcaacagcgacacctgagccaacggcaacggtgacacctgagccaacagcaacggtgacacctgagccaacagcaacggcagaacctgagccaacggcaacggcagaacctgagccaacggctacaacagaacctgagccaacggcaacggcagaacctgaaccaacggcaacggcagaacctgagccaacggctacaacagaacctgagccaacggcaacggcagaacctgagccaacggcaacggcagaacctgagccaacggcaacggcagaacctgagccaacagtaacagcagagcctgagccaacggcaacggcgacacctgagccaacagtaacagcagagcctgagccaacggcaacaacagaacctgagccaacggcaacggcagaaccggaaccaacggcaacggcagaacctgagccaacggcaacagctggaccgcagccgggcgatattgtttctataaatgtatcaaaaatatgggaagacgcagaaggcaccgcgagtctaactccaccagcggaacttgatggaagtcaaatagaaattgttcttattaaaaacggagtaagaactgagcaaagtcttgtattaaacaatgaaaacggatttaatggaagttttaataatctcaatagatttgatgaatcaggaaatgttatagactattcagtccaagaagttaacgctccgtttggttattgtgcattctatgaaaatgacggaatcaacagctggaccgttacaaatgcacaggcgaatattacaggaaaggtattctatgatgctttgaataacggtgtttatgatttggataccgattcatttattaagaatgcaaaagtagttcttgaggatgaaaatggaaatcaggttggagaagctgttttaactgatgaaaacggatattatttctttagccgtgtaccggtgaatgatgatggaactgaaacaaaatatacagttagggtcatttcccctcttaatgatgtgaagtgtaccacaactgagaccggaaaccagactgaagaaattataggcggttctttaaatgtgacacagagcgttgcgctctccaagacagatatgattatagacgcttctgacacaggtctgtatggagatgttaaggatttagaggaacagaatataaacgttgcggttaaaaaagtttgggaagataataataaccgtaagggtaaacgtcctcaagaattggaagtatattataccttgaaaaacaaagagggtatcgttataatttctaaaactttgattctgaatgaagaaaacaattggcaggaagagtttataatgccataccgtgcaattgaagattctgaggttgtggagacccaagttgacggatataaggatcccaaaataacaagtacagttgataaagagagtgaaaaatttattataactgtaaggaattcaattgtttcaaattcaagttcaggcggcaatggaggcaaacctactggaggaagcacgggcacagagacgggcgcaccgtggccgacatctactgctaaaccgaatccaaatgtatcggcaactcctaaaccggagattcctgaacttgataagacgaaccattacgcttatattatagggtatcctgaaggcgatgtaagacctcaaaatgatatatcgcgcgatgaggtagctacaatattctttagaatgctgacggatgattcgagaaatgaattttggatgattacaaatccatatactgatgttccggcagacatgtggtcaaataatgcaatatcgacgatgtcgaacgcgaaaatactgaccggtgacccggatggaaaattcagacccgctgacagcataacacgtggcgagtttgcagctatagctgccagattcagcagtaaagagtataatggcgagaatatgtttactgatataatcggtcattggtctgaggaatatattaaccgtgccgcacaagaaggctggatttcaggttatccggacggaagcttcaaaccggaccagtacataacccgtgctgaagcgatgactcttgttaacaacattttaaaccgtcacgccaaagagagcggtttgcttaatgatatgctgaaatggccggataatgtgcccggagagtggtattataccgctgtccaggaagctacaaattcacattattacgaccgtgacagcgacggatataacgagacatggacagaaatcagagaaccgcgcgactgggttcagcttgaaaaaacttggtcggacgctaacagtgccggcagtgaagattcggtttatagcggagagtaatatttaaaataaattttctgcaataaccgttttggaaaaaaataataaaacccttgacaaaaggggttttgagtgttatcataatagaagtaaatgatatcgggcagaagagtgagggaaacctcactcttttgcattgtattatcaaagttaattgttggtattgagaattcagagaggagttgtggttttgggagcgatgacgttttcaaagattgaaaagattatattcgaccttgcggagccgatagctgaagagaatgggctttatatctatgatgtagagtttataaaagaaggcggacattggtttttaagagtgtatctggataaaccggaagaaaatgagtatatatctattgacgagtgtgaggagttctctagaaagcttagtgacgttttggataggagtgaccctatatcgcagaattattatcttgaagtttcctcaccgggaatagagagaaaaataagacgtgctgagcattttgaagccagcaagggcgagattgttgatgccggtctttacaaagcaataaacggcagtaaaacgcttacaggtgaacttatgggtcttgatgacgaagataatgtgcttttgaagatagacggcgagactgtgaagatacctatcaaacagactacggttattaggactcattttgaattttagtctttgccgagctgtttaaaattaattaaatatgtatatcaaatttcacatattatatagagaggatgtttaagaaaaaatgagcgcagagttgtttaatttgttggacgagatagaagaagagaaaggtataagtaaggacgttgtgctggacgcgcttgaaagcgcgctgatatcggcatacaaaaagaattttggcgcggttgaggatataaacgttaaattttccgatgacggtgatataagaatttttgctagaaaagaagttgtagaagaggtagaggacagggaaacacagatttctttggaggacgctcaaaaaattaaaggtgattataaggctggagatgttgcagaatttgaggtaacacctgattcattcggcagaatagccgctcagaccgctcgtcaggttgtttttcagagaatacgcgaggctgagcgtgagaaaatggtagatgaatacagtgaccgtgagaatagtatcgcgagtgctattgtcagaaaaatagagcgcagaaatgttatgcttgaaattgacggcgccgaatctgttcttatgccgaacgaacaggtgaaacatgataactatagagttggtgaaagatataaagtatttgtcgttgaagtagctgatagtataaaaggcgtgcatttggttgtttcacgttcgcatcccggtttggtaagatgtttgtttgaacttgaggttccggaaattgcacagggaataattgaatttaaaggaatttccagagaggcaggttcaaggtctaaaatcgctgttgcttctactatggataatgttgatcctgttggaacttgtatcggacctaagggaatgagagttcaaaatgttattgatgaattaagaggagaaaaaattgatataatcagatatagtgatgatccggcggagtatgtttcaaacgcactcagtccggctgatgttgtatcgatagaagtctttcctgaaaataaaatgtgtaaggttgttgttcctgaaagccagctgtctttggctatcggcaaggaggggcagaacgttagattagcggcaaggcttacaggttggaaaatagatttgagttctattccggacaatgagataaagaaaggtgacaaaactctggaagctgcttttgagcagttgggaaatgagcttttaaccgaagaggatatggaaaatgaggtttcggagattttgaacgacagttattgagtttattatattggagggaaatatgccgacaagaatgtgcgcagtttgcagaaaacgttttgaaaaatcagaactgaacagagttgtaatgtcagagtcgggtgagattttttatgaccgtacaggaaaggcccaagcccgaggtttgtatatttgcagagaatgtgtgagagaagcggaaaaaaagcgtgtttttgagcgtgaatataagcgcagagttaagccgtcggtctatgagagatttgtgtcggaggtggagtccgggtgagtgatgaaaaactattgcggtttatcggtcttgctatgaaagccggaaagcttatgcttggagacggcagggctgttgaatctataaggtcagggaaggcaaaattagttttaatttccaaagatgcttccgataatactaaaaagaaatatagaaatatgtgtgagtatcggaatcttaaattattggatatattttccgacagaaatgaatttggtcagtgtataggcagagattttgcggtagtggccgcagttgaggacgatggattcgcaaagagaatcgttgaacttgcagaaagggttgatgaataatatggaaaaaatacgagcttatgagttatcaaaaatatttgggtttcccagtaagaatatagttaatgttcttcatgaatatggggtatcaacaaaaaatcatatgagtgctctgtcagagtatgaacttgatgttatttttgaatactatactcagaagaatcaagcaaaggatttttctatctttgataaaaagaaagaagagccaaaagaagcagctgaaaatgttagtgataacgaagacttcactccggttccggaaatagaagtaggcagaaagctgcgtactgttgatacgcgcgtcaataatgtggatcttgaccgtattgatgatgaaaaaattgaggagcttattcctgaaaacgttaaacagggagataagaagcagaaaataaatcagaaaaagaaacagcagcagagacagcagcacagcactaaacaaaaacgcaaacctgaaaatgttataaaaaaggttgaaaagaaagaaaagaaggttgagccgctcaatgtgctggtaccaaatgaaataactgtaggtgaactggcttccagaatgaaaaagtctccggcagagattataaagaagctgatgcttttgggtattatggctactgtaaatgaaactttggattttgacacagcctcacttatggtagaagaatttggcggaatcgttgaaaaagaaataattttaacggatgaggaaatactatttgatgactttgaagatacagctgaacagctcaagccgcgttcaccggttgttgttgttatgggtcatgttgaccacggtaaaacatcacttcttgacgctatcagagacacaaatgtgacagagggagagttcggcggtattactcagcatattggtgctcacagagtacgtgtaggagagaaaaagattacgttcctggatactccgggacatgaagcgtttacggctatgcgtgccagaggtgcgcttgttactgatatagctatactggtcgttgccgcagacgatggaattatgcctcagacaattgaagctattaaccatgccaaagcggctgaggtttctatcattgtagctattaacaaaatagataaggacggagctaaccctgataaggttaagcaggagcttatggaacacggtcttgttcctgaggaatggggcggagatacaatatgtgttgaggtttcggcaaagaagagacagaatataaaagaactgcttgaaatggtactgcttgttgctgaaatgaaagagcttaaggctaatcctgacagaaaagctaaaggaacagttattgagtcgcagcttgacaaaggcaggggttccgttgctactgtgttggtacagaacggtactttgcatgtcggcgactatgttgtagccggaaccgcatcaggtagagttcgtgctatgaacaacgataaaggaaagtctgttaaaaaggccggaccgtctatccctgttgaaattttgggattgtctgaggtacctgagggcggagacgaattttatgttgttgaagatgagagaaaggcccgcagtgttgttgagaacagaaagttccaggagaagaaagaaaagcagaagagcgctacggctatatcgcttgataatttgtttgagcagattgaagccggcaagatgaaagaccttaatatcgtcgtaaaggctgatgttcagggaagtgttgaagctgttaaacagtctcttgagagaatttcaaatgatgaagtccgcgtaaacgttatacatggtgcggtcggagctatcaatgagtctgacgtcatgctggcgagcgcgtccaacgctataattgttgggtttaatgtccgtcctacaaacggagcaagcgatgctgctgaagacgcaggggttgaccttcgtatgtaccgtgttatatatgacgcgattgaggatattgaaaaagctatgaagggtatgcttgagccgacattccgtgaagaagttaccggccatgtagaaataagaaccacatttaaggtttcaggcgtaggaactattggcggggcatatgttttggatggcaaaatcagaagagacagcttggtgcgtgttgtcagagacggtattgttatacacgaaggtgagctgaattcacttaagagatttaaagatgacgttaaggaagttaacgcaggatatgaatgcggtcttagcgtcagcaattataatgatataaaagacggagatattatagaagcatatattatggcacaggttgaacccgaataatctgtgccgtaaaggctcggataagaggagatatttatggctaattacagcagaaccgacagggtttcagaagagataaaaagagaattgtcagcaataatacgcgatttgaaagacccgcgtctgccgcagatggtatctgtggtttcggtgcgcgtcacaaaggatttgaagtttgctaaagcaaacatcagcgttatgggtgatgaaaaaactaaaaaggatgcgtttgcagcacttaaaagtgcggccgggtatattaaaaaagaggtcagcaagagattgaatctgcgccaaacgcctgattttacttttgttgaagacgatagcattgaatatggagcccatatagaggagcttttgaaaaatttatagttgtgaactgcattaggacagacgtatgaaaagaggtactatatgtttgaaaaactgattccaataatagaaaaggcaaataaaattgcaatattcacccacactcatcctgacggagatgctatgggaagttcttatgcactaaaattggcgcttacgtcaattgggaaatgctgtaaggtatttttgcttgatgaccctgacgcttccgcatttggactgattattaaaggtgatgatatcgaactgtcacttgaggattgtgatttagccatagcgcttgactgtgcggactctaaaaggcttggaatgtatgaagagccgtttatgagtcatcctaactcgatagctatagaccatcatgttacacatgttgaatttgctaaatcggggactgtgtattctgatatttcatctacatgtgagctgatgtttaatctatttaaagaaatggatatcagtataaataaagaaataggaaataatatatacgtcggtctggcgacagacacaggcaattttaagtattcatgtatcagcggagataccttaagggcagcaggagaattgatagatttgggtgtggattttgcgagcatatcaaaggctgcatttgatacaaagcctaaggcgtattacgatttaatggggattgctataggaaagctgagaatggtatgcgatggcaaagctgcagcgctctatttggaatctgaagattttaaaaaagcgggaataaaagaatcagaggccaatggtatagttaatataccaaacagtattgaaggagtagaggttggggcgtttataagaaagcgtgacgatgatgaatacaaagtgagtcttcgttcaaataaatatattgacgtttcagaaattgccgctgagagaggcggaggcggacatgtgcgtgcaagcggatatagtgtaaccggaaaaactgtggatgagataattcaggatttagcagagggattggataaaagatggcaggattaagcggtattataaatgtttataaacctaaaggtatcacatcccatgatgttgtttataagcttagaaaaattctgggaattaaaaaaattgggcatacgggaactcttgacccggatgcagaaggtgttctgccaatgtgcataggcagagcgacaaagactgcggatatgctcaccgctgccgataaggagtatatggccgaggttacgcttggtttctcaactgatactcaggattcatcaggctctgttataaaatctgttgatatggatgattttattgttagttctgacgacattgaaaacgcggttactaaatatataggcgatataaatcagcttccgccaatgtattcagctataaaaattggcggtaaaaagctgtatgagctggcaagacaagggattgagatagaacgcaaacctcgctttgtaaaaattaacagtattaagcttttggatttttatccaaataaagaacatgtgatgaaatttaagatgcttgtgtcatgttcaaaaggaacttatatcagagcgctttgtaacgacataggtgaagatttgaagtgctttgcgcatatgtcaggacttgtcagaactaaaagcggcagatttgatttggagcattcgtataaactgagtgaaatagaaaacatggcggcaatcggcaatatgtcgttttttacacctgtagacgaggtgttttccgagtatggaaaactagttctatcagataatgctgcctttaagatgtgcaacgggacacaggttaaaagccctgctgaagcaaaagacggcgttacatatagagtatatgatattaatggtaaatttcttactatctcacgtgcggagaatggaaaaatgaagatattaaagacattttatcaggattaattggaggtgtgagcgtggagtattacgcacaggatgagttgttcaacaagcatgatttggataatctgcggctgaaaaatacagctgttgcgctgggtgtttttgacgctatgcacttaggtcatcttgagataatagatgatgttgtaaaatatgcaaaggaaaacggtcttaaatcggtagtatatatgtttcgtaatattcctaagagtgttattactaatacggatataaaaaatgttaacctgttcaaaaagagactacacattctctatgaaagaggggttgatattgttgttgccgagaggttcacatccgagtatatgaaaatggaatatgcggattttataaaaacttatctagtggaaaaattcgacgccaaatatgtttgtgcaggatttaattatcactttggatataaggggttggggaatacagaatctctcaaagaactctgcggaaaatatggcataaaggtacatattgcagagtgtaaggctcttgaaaaacctgtgtccagcactcttttgagaaaacttattgcttcaggagagatggaggaagcagcaaaatatctaggacggcagttttcggttactagaaaggtagaacatggagaaaacatcggacataagctggggtttcctactgccaatatacaactgcctgattttcatgttgtacccaagttcggcgtttatattacaaaggcgaaagttggtggaaagtggtataaagctataacaaatgttggaggaaaaccgacagtcgggacaaataagccatgtattgaaacatatatgcttgactttgaaaacgatatatatggagaggaaatagaaatagagttttatcattatttaagacctatttccaaatttgaaaatattgaggctttaaaaaaacagttggctcaagataaagagtcagcaagagtttattttaatgaaaaataaagttagctgaaagcggaaatagactgcgttatatgcagtgggtttcgctttcttttttggggagtaagataatgagtgaaaaagtaaataaatatgaaatggacatgtgcagaggtccaattttaaagaaaatgctgatttatgccattccgctaatgtgttcaagtatactccagcttatgtttaacgctgttgatatcgtcgttgtggggaaatttgccggtgataattctctggcagcggtaggttctaatacttcaataattggtctcataaccaatttatttgttggtctttcagtagctgctaatgttcttgtggcaagattttatggagcaaaggacgaaaaggctcttgaacagactgtacatacttcaatgcttctcagtcttttcagcggtataattctctcaataattggagtagccggcgccaagtggatattggttttaatgcagacgcctgaagatgttcttccccttgcaacgttatatcttaggatatattttcttggaatggctgctacgatgatatataattttggaagtgcaatcttaagaggcgtaggggatactaaacggcctttatactttttgtttggagccggaatagttaatgttatattaaatcttttatttgtaattgtatttcatatggatgtagctggagtggctattgccactgtaatttcacaatgtatatcggcttttttgatagttcgttgtctgatgaaagaaaacagcggtatacgtctcaaattgtctaagcttaggataaacaaaaataaattgctgttaatttttaagataggactgccggccggttttcaaggaatattattttctctttcaaatgtggttattcagtcgtcaatcaattcatttggttctgtggttatggcgggtaatgcggctgcacagaatttagaaaactttgtgtattttgctatgaatgctttccatcaagccacagtgacgtttacaagccagaattatggtgctctaaactataagcgaataaatagaactgtgattctaggtgaaacatgtgttgctatagtcggaattgtactcggaaatttacttgttctatgcggcggcggacttcttggcatttatacatcaagcccggaggttataagcgcaggaatagacagacttaatatagtatcgcgaacatatgctttgtgcggaatgatggatgttatggttggtgctttgagaggtattggctattcggttataccgatgatagtttcattggtcggggcgtgcggcttaaggctggtttggatagccgctttgtttggaatagagcagtaccataatgtgacaacggtatatttatcatatccggtttcatggcttttaacttttatgatacatactttatgttttgttttgctaaagcgtcatttagaaacgcatatgaaaaaattcggagcgggatattaatcgcgtaaaaatatatttttgcatgattgtattattataaaagggtatttaaactttaaaattcattaaagttttactgattactgttttaaaaatactctgataatttaactttaaaaagtttattttctattaaaagcttttttttggaaatagtagatatgaaaattaggggctatacaacaggtgtgtataatgattatgatagatttttgactatagtataatttataataaaataatatattatactatatttttggtatcatttaaacagatcggtctgtcaaatagactgatctgtttttttatgcaatttatcctctaacactttttatgaaactgcatatcttatattgtaagagttttatttttattaaatataaattaggaggaatcactttgattgaagcagaaagattagtgtcttcacgcccgtttattatgtattcgggaacggatgtcagcggaaccgtagggggtaatccgagtgttcaaagttactgtggcttggattatacagccgcgtcccgctatcgcttagacagacctgatcataatcaaatatttcaattttttggaaatatattaggcagtcagaataaacttgtttactgtcttgataaatttgcagacggtccatataataacgtgccatatgagagccgtccgtttgaaacactttttccgggggcaacggagagacaaaaagaaatgttgggatggattttggcaaatacatttccggctgtgagcgcggctgctacatttgcgcttgccggagtagatccgacagcagcaccggttcttgacaataatgatgcgtatgcagccgttcaagtatcattatgggtacttttggaacagatagcgcttgatgaagttaattttttagagtgcacatcaggcgaaactcatccaaaatctgaaaggctgagaattacagttttagaattgcttcgcctggccggtcaatttgttgataatgagacgctgcctgaaatatcaattactcatacagagccatgctgtggattaacctcattttttagctgctgtaataatagtactttaccgtcagacggcagttctccatatttagtttttgcgaattgtcctaacgaggtcagaacaatttgcggaaggcttctgatagggccgtttcgtgtttcatcaagtttcgcaggacagccgactataacggttacgcctttctgtaactgtggtgaagattactcggtatcatttatggatttctgtggtaatccaatttctaatcctgttataggacaggagttttatattgctatcagaacttgcaaaagattttcgtgctttactataaccgcttcatttactggaaatattacaagagtaataactttagaaccgcagagtacagcattaaactatcagcctataggtacatcttttgaggaccagtctattacattaaatgctgaattatgtatttgtgttgagtatccggcatcatctgaaagttttgttgataatggcaggtttggtataaatataaacaataacaacaacaataataacaataacaataataatagcggaggagggtatccgggtcagttcccttgtataccaatttgttatccgatttggcaaaatcctcgtccgccgtatccgccggaaccaccatatccacccgatccgccgtatccgccaagaccaccgcgtccgccatatccgccatatccgccatatccgccgtgcccgccatgtccaccatgtccgccggaaccaccatgcagaccagagccgccatgcagaccagaaccaccatgcagaccggagccaccatgcagaccggaaccatcatgcaggccggaaccaccatgcagaccggagccaccatgcagaccggagccaccatgcagaccggaaccaccatgcagaccggaaccgccatgcagaccggagccaccatgcagaccggaaccaccatgcaggccggagccgccatgcagaccggaaccaccatgcagaccggagccgccatgcagaccagagccaccatgcagaccggagccgccatgcaggccggagccaccatgcagaccggaaccaccatgcagaccggagccgtcgtgcagaccggagtcgccatgcagaccggagccgtcctgtaagtcaacttctgcttgttcttctaatccaccatataagacaactgcacatattaaaaatgaaaaaacagggagtcagattactaataaaaagcatggattttgatttacaaacaaaaaagctcaatctttttaagattgagctttttaattttatatgcaaataattttataatgcatacttatgtttataaaattcataatcctctctgtattcgcctggcatttcagcatgtagacgtcttaaatattcatgcctgtccaaagctctcttatcagatcttgcttgtagtatagcaactcctatgtttgaacagtgatctgaaattctttccacattactgattatttcaagaaatattacccctgcttcaacagaacatttctttgacttaaggcgtttcatatgcttgcgttctaacttttcctgaataccgtctacaacctcttcaagaggttctattttacagaccaaggatatatcatcccaagtaaatgcctggaatgtaagttccataatattttcaacagcgttaaacagaacttttagaccttcttctgcatcgggagagaattgtattttcccgtttatcagcttttcaatactctctctaatattgtcacaataatcacctatgcgctcaatgttgtttacaagatgaaaatatgctgctgatttttcattatcagactgactgagctgtgtatcggaaacttttgtaagataagcagtcagattgatttcatattcgtcaagaagttcttcgtttgcgagaattttctcagatatagacatatctttgttcttaatcatctttcggcagagcataacattttctttagctactccgcacatgtttgacattacagtatgtacattatttattgctatggatggagtagaaagaaaacggtcgtccagtaatgcaaacggactttctgtttcctcgtgttttgtatctttgattgtcttttgtgcaagccataccaatagccttgaaaatggtaaaagcattatcgttgaagcgacattaaatatagaatggaaaatcgatatatctgttgcatttattgccgaatgccaaaaaggcaggcccaaggtgtattgtaatgcataaataacaaccatgaatactatagtgccaattatgttaaaataaaggtgaatcattgcggctcgtttggcgtttttacttgcgccaacagaagataaaagtgcggtcacgcaagtaccaatattctgccccattattattggaaaggcagaggaaaataccacggcggtactggaagctacagcttgaagcatagcaaccgatgccgcgctggattgtataatggctgttattcctgttccgataagaattcctattacaggattattttgacctgcaaatacattctgaagcgatggaatagcgttaaatactacttccatagaatttgacatgtattccataccaataaatataagaccgagaccgactaaaaattcgcctatagtttttatatttttcttttggcagaagaaaagaagccctgctcctaaaataatagcaacgggagccagcgttgtaggtttaactatggcaaggtaccaaacatctccgggcaaatcgtttaagctgagaatccacgctgttatagtggtgccgatattggctcccataataattccaacagcctggcttaaggtaagtataccagcattaacaaaaccaacaaccataacggttgttgctgatgatgattgagtaagcgccgcaacaacggcacctaaaataactgacttaaataaatttccggtaactttctccattatctgacgaagcttgtctccggcagctctctcaagaccggtactcatggtgttcatgccaaacaagaacattccaagaccgccaaatagtgagagaatttgcagcgcgatatccataaaggacacctccataatttaatttaactcaacttccaccgactataatatatcatcttatacgacaaaatacaactcgtaatattgcatatattagtgatagtatttctttaggaaatttagtaaaatttttgtgttaaagaaaataaatggaaatatcgtgacttatttgagaagaatataattaaaagaaccatgtatagaaaaatacatggtcttttttttaaaatagtattattatatttgaattatagttaaatatataaaactgacataccaactccgaccatatcattgggaacatccccaattctccagccgggttcagtagtttcgatataatagtattgaattccatctaaggacaaattaccgttgcttgaagtctgtaaacctacagccatatggtcttcactcactaggagaactgcaccataacctaggagtttcagcattttagccaaaagcaccgcactgtcttcgcagtcaccgccttggtcgaatagtgtttctatcgggtatttagggtattctataactcctttgtaggttaaatcatcttgatattccaagccttgaacaaaagctgatataaatccggctatatcataagaggaggcgaatccattgtttattgccatatctctgagagtttcagcaagagtataaacagccgtctcgtcagcctcatcctgagcatatgcagagtaattattagttcttggttttgaaacaaaatagttatagtcataatatgaaatgcttacatccagtctgaaagtttctccatagaaaggatagttccatgaatacgacaacgattgataaggtttatcctgattaagagaaaacgaaattcttaagtctgtgttgattatacgtgataccattgctgcggcttcagaacgtaaaatatctgaagctggataaaacgttccatattcatcactaccggttacaactcctgattcataaagttttaatatctcttgataatatggatttgactctctgacatcaggtatgggagatatttcattaattttttgataacagtcaggcagagctttaaataacaagtaagctaactgttctcttgatgcggggtttaagtatcttccgctgaattgatttggttctattatcccttggttaaccgcatactcaagatatggcatgaaccaagtcatatttgcctgtcggttaacggagcctacaccgtttgtatttatataaactccggtttttggggtttgcgtcatagaatcgctgtcatttatttgaaaattgccgtttccgcttataggatatgaatatttgatattgttgttatcaagtgaggcaatgcttccgccagagtttaatttgttaattgtattgccgtagtatttagcattgagtcttgaagctactgttattgcctctgccagtgtaatgtttccgtcgggtgtaaacatattatcgccggttccggtcattattccgtattcataagcaaagcctacatagtaataataccaatcgtcatcgtaaacatcagcatatgtagaagaatcataatagtttgtctgttcaaattgtggaaatatttcggcaaatgctgtagcagaaacagatgttaatatacataatacgagaatagttgaaataaattttaatttatattttatcatgacgcacctcacttatatagagtgtgattaattgtcatcgtgatttttatcgtcagacggttcgtttatttcatcgctttcagaactgttttcagtatcgggttcaaccaaagtaacaacagcttcttcaattctgtggtcagcgactttggttacgtttattttcatagacccgaaagacagctcaggcatttctccatctgcggggactgttccaagctcatctaatattaatccggcaaaggtgttatattcttcgtcaggaatatctataccaagttcttcttcaacgtcttcaatttctgcgcagccctgaataagccagctgtcgtcttcgccgggaagtttaacaatttcttgttcctcctcaggctgatcgtattcgctgtacagttcaccgactatttcctcaatcaagtcttcttgtgtaactatgcctctaaaaccgccgtattcatcaagaacaatagcgaagtgagcatttttatcctgcatttgagaaaacatttcgtcagcttttatagactcaggaacaaaatatggctctcttaaaatatctctaagatttccattcctgtctttaagtaagaatttgtaaaaatcacggctgttcagaactccaatgatatcatctatagcattgccgcatactggatatcttgtatggtttgtttcatttataatttcttcccacttatcaggaccgtcatttatccacaagataactgcgtcggttctgtgagtcattatgtcttcaacaggtttgtcgtccatttcaaaaatattatgtatcatttctttttcatcgtcatcaatggcgccgctttctgacccgatatcaaccatcattctgatttcttcctcggtgacgtcatcatcgttttcgtctggccgaataccaaagattttcaaaataatttttgatataattcgaggaatccatacaaatggtatactcaaatatgttacaaagattgaaatgggagttaaggctacagaaatactttcagagtattttccggccagaccttttggaacaaaaattccaaatattaaatatactaaagttgtaatgaaagaaataattacaaaactcaatatacaagcagcaatgatatttatattaagctcggtaaagtacgaaaccagcggaatcaaatacatatatattgcacatccgcctattgagagcagtagtaagctgtttataaattgaatagacgctacaaaatcccctgagtttccatcgagaaattttgaaagccgtatggcttttttgtttccgctgtctgctagttttttaagttttgcatcatttactacaattgttgactgttcgattaaagtaaaaaacatacttaaaccaaacaaaatcaaaagaatcacccataacgattgcgtagggggcaacgtgtccaaaaataatcatccttccaggcgaacataacccataataatttttattgtccaccagtataacagaaaatatgataaaagtcaaattctatattgtaaacgtttagttaacttttaaggtatatacgttatatttataaaaacgttaataatcatattttctaatccgatgtatctaaaacaatatttttgaaacttgaagttttaattagggctaagatagaaatattttataaataataggttagctaaataatataataaaatatttttataaacttaaaaacgttttattacaatatggctgaaactaatccacagtatctaataacattatagcatatgtctttagaatggaacaatattaactactactttattaacgaggtgtaatatatgtattataaaaagtaaaaataagtttttaaaatattgtaataagttttaatgaaacaagtgtattgcaagcatcggtaggtgtgaccacacttgtaagaatagtgtgtgttatatacattaacttgttttgccattacttgcgatgtcattaatatgtatactcaatgcggacaaagtccgccgcgttaggcgcgcagccgcgaaaaataataacattattgtatttaattattttaatctaagcaagcaaattatatatatatgtaattaattatgtcaattcttaattattttatgttataaaatattgaaagctgtgattcacacagaaccacagcttttaatactacaataaacattcattctttttttatatcaacaccaagatttttaagcttttcaacaaagttttcataaccacgttcaatgtgttcaatatcatgaatcttacttgttccatcggcttttagcgccgcagcaactaacgcggcgccggctcttaaatcggttgctttgacttccgctccgctgagacgttttacgccttcaataaaagcggcgttgccctctgttttaattttggctcccatacggcaaagttcaggaatatgggcaaatctgttttcaaaaatggtttcaacgaccattccgttgccatcacttgtagacagcagtgacatggtctgagcctgtaaatctgtaggaaatccgggatatgggagagttttgatatctacagatttgggcttttggcagggttttaagtctataaaatcaagaccggtttcaaacatgaatcccatttctgttaatttagccaatagtggttttaaatgcagaggttcaatattctctgttttaattccactgcctaatccggcggcacagatgataaaagttccggcctctattctatcgggaataatcttatgattatttttgtgcattcttgtcgtgccttttattattattgtgtcacttccggctcctgtgactgagccgcccattccgcataggaaatcagctaaatcaattatttcaggttcgttggcagcgttttctatagtggttgtaccattggctaggcacgctgctatcataaggttttcggttgctccgacactgggaaaatccagatatattctagttccaaccagaccattttttgcggacgcttcaacaaatccatgaccctgcttgatttttgcacccattgcggcaaaaccttttaagtgaaggtctataggacgggctcctattttacagcctccaggaagtggtatacgaacatttccgaatcttgctaagcatggtgacataacaaggactgacgctctgagctttgaaaatagtgaataatcacgcaatcttttaggttttgtgatatttgccgagattctcattgaaccgtgcttgtctctataaatatcacagcccagaccttttataatttctgccattacatcagtatcagaaagatgagggacgttatctaaaactgattcttcttcggaaagaagtgccgctgccataatcggaagagcagaatttttagagccgctaatttttacatttcctccgaaattttcacagggaccgtttataatatactttgccatataaaatcattccttaacgtattatatttgaagttgagataataccggtgctttgtgggctttcacctgatatggccagtataggaacataggtttttgcagttaaaacaaaagcgcaggtcaaaattaatgatgttataagcctttttttcataaaatttcctccaaaaccgcataataaaattttaagaattatgccacaatagtattttgacctgtaacaacttttttataacttgtattttttaaataaaaagataatatttaagataataataaaaatattgttttaaaaataaaaatttatactaaaggtgaagaagcgtgttgttttatgcaaataaataatgacaacaatttgataaaaaacaataatttaaaataaaatataaagaatataagtcttagtaatacaagatattttcatataattaaaatataaaaatgatatataattttttaaattttaaaattattttgttcaatttaattatcataacataatgcaggtatatttgcgaacttcggcaggcttgcggagcaagcacgtaaggttcgccgccatctgaccgtatatagcggtcaagataaaataagctgtttatattattctaggttatgtaattgttaaataattatattatactcaaaccttttaattatcataacataatacatgtatgcttgcggagcaagcacgtaaggttcgtcaatatctgaccgcaataagcggtcaagataaaataagctgtttatattattctagatatgtaattgttaaataatcattatatactcaaaccttttaattatcatagtataatgcaaatgtatttgcgaacttcggcaggcttgcggagcaagcacgtaaggttcgccgtcatctgaccgcttatagcggtcaagataaaataagctgtttataatattctaagttatataattgttatattttacttcaaaaataaattagtaaataaagtttgcaaatattataagtaaactagtatataacatatcaatttattaaaatattctttataaaaacaataattaattttgttaatataatcttgaccgctataagcggtcagatgacggcgaaccttacgtgcttgctctgcaagcctgccgaagttcgcaaatacatttgcattatactatgataattaaaaggtttgagtataaaatgattatttaacaattatatatttagaataaaataaacagctaattttatcttgaccgcttattgcggtcagatgacggcgaaccttacgtgcttgctccgcaagcctgccgaagttcgcaaatacacttgcattatattatgataataaaaaggttagtaagtaatataattatttaacaaattgaattgcagttaacaatttacattaatggactatgggttaaaaggtacaaaaacataagtatgtatacaacaaattgagatgttgtaaataatttatattgatttattatagattaagagacatgaaatctaaggtaagaaaacaataattttataataattttcaatcttgtttgatttatgatactttaataatttacataaatagttagtaaaaatatgtaaaaataaaagaatgcctttattggcattcttttaatataaacttttacgctggatgagtcatatcatcataattgactaagtctttgtcaattttatatttttcagcttttctctgttcaaagaatttgactgcaacttggtcaaacagtgcatatgaaagtacatcttccggctgttctgtccattctgcacattctttcttgagcttctcaagctcaggctttattaggtcggcaggacggcaggtaattgccttttcatttcctattatcttctttctgaattcatcatcaatcggaacaggagttctgccgtattcacctttacaaattccctttgtctctttggttaccatcttatagcgttctcccatgagcacgtttaataccgcctgggtgcctactatttggcttgtgggggtaacaagaggaggatagcctaaatctttacgtacttcaggaacctcttttaatacctcgtcaagtttgtcttcttttccttgctgcttcagctgagaaactaggtttgacagcattccgcctggaacctggtattttaatgtgttaatatcaacgcctaaaacctttgtgctcataagaccggaagccaaatacttttctcttaaaggtttaaagtattcagcaatttcagtgagcaggttaaggtcgattcctgtatcgtattctgttccttgaagtgttgcaaccaatggttctgtaggcggctgagatgttcccagagccataggcgacaatgccgtgtctacaatatcaacaccggcttcgatagctttaagatatgtcattgaagcaacaccgctggtatagtgtgtatgaagctgtatcggaattttgacagcttttttcagtttctttacaagttcaaaagcattgtatggagtcaaaagaccggccatatcttttatgcagatagaatcggcgccgcagctctcatattcttttgccaactttacaaagaaatcattattgtgtactgggcttatagtatatgatatagccgcctgaacgtgacctttttcttttttagtagcattaatagctgtttgaagatttctaacatcgtttaaggcgtcaaaaattctgattatatcaatcccgttagctatagatttctgtacaaaatattcaactacgtcgtcagcataatgtctgtaaccaagaacgttttgacctctgaacaacatttgaagttttgtctttggagcggcttttctgatttttctgagcctctcccaggggtcttcattaaggaaacggagacaagcgtcaaatgtggcgcctccccaaacttccagagaatgataaccgactttatccattagaggcaatgctggcagcatctcttcagttgtcatacgagttgctataagagactgatgcgcatcacgacatatggtttctgtaattcctactttagccataatattttcctcctataattattttaagattaatgagcgaacatagcgaggaatacgcctgccgcaacggcagaaccgataactccggcaacattcggacccatagcgtgcatgagcaggaagtttgaggggttttcctcctgtccgactacctgtgatacacgggctgccatcggaactgctgatactccggctgaaccgataagcggatttacttttccgtgggtcagtttgcacataagtttgcctagcagcaaaccgccggcagtactgaaacagaatgcaataagaccaagcgcaactatacctagtgtagcaggtgtaaggaatgtttctgcctttgcggttgcgcctactgtgagacccaggaatattgttataacattcattaaaccattttgagcggtctttgctaatctatcagcaactccgctttcttttatcaaattgccaagcattagcatacctacaagcgctacagcgtcaggcacgattaaggccacgactattgtaacaatgatagggaacaagattctttctctcttgctgaccggacgaagctgttccataacgatagaacgctcttttttagtagtaagtcccttcattataggcggctgaataaccgggataagagccatataagaataagcggctatggctattgccggcagcaattcaggcgccagtgttttagtaacgtatatagcggttggaccatcggctccgccgataattccaattgaagctgcttgttcaactccgaatccgattgccggaatagctgcgcccaatgcgagagcaccaagaaaagttataaatacgccgaactgtgctgccgcacccaaaagaatgctcttagggttagcaataagcggtccgaagtcagtcattatacctattccaaggaagataagaggaggatagattcccaatttaactcccaaatagagcaagtccaatagaccgccttcagcaaaaatcctttgtatatccaaatgaccgtctatcaaatacgccgggtctgtaaaaaattcattgtgcattaatatagcgcctgaattttggaacataggcatatttgttagcagaacaccaaatgctataggcaatagcagcagaggctcaaattttttcactatagccagatacagcagaacgcatgcgataactatcataagcggagttcctataacttcaagaatatttccgcctgatgagatagtctcagatattgagtttatcagcgctgctataccggtgcttcctaaaaagcttgaaaaagcctgtaacaaaaaatcaccctttcatcaatatattttggttatgtttcggttggataataaattaaccaatagaaacaagggcatctcctgtattaacggaagcgccttggctggtgcagacagcaactattttaccagattttggcgccataatttcattttccattttcatagcctcgagtacgcaaagcacatcgccctcatttactgtgtcaccgtttttaacttttacagatacaatgcttcccggcatcggtgcttcaacagttgttgcgcccgaaacaggggctgaggctgctgaagcctgcggagctgcttttggagctgctgccggctttggagcaggagcggcagacttttgaaccggagcaggagcgccgccgatttcttcaacctctacctcatatgaattcccattaacacttatattaaactttctcattatactttacctcctggtattgagtttaaaatcttgaattgattacgtcggtcaggccggccttgctccagcttggcagagcgttgccaactcttctgtatgattttatatttagattataacttgatgtgttaagacttgcagctatagcggcagtcaaaacagctatcaattcgccctcgtccatctcaggggctgattttgcagtcgcgttggcagcctgaggcagtgtcttgttactgtttgagggtgtattttgttctttttttgaattatcattgtaaaatagtgttttcatacccattaaaacaaacataagaatgactagaactgcaaacacgatagcaagtccaacaattgtgacctgcagaccttcagatagtgctgcgcctattgtcatagctttattctcctttcatatttatgtttaacatctattacagaggaatattaccatgctttttggcaggtcttgtatctctcttgcttgcgagcatttcaagagcgcttataattctcggacgggttgagtccggctctataacatcgtccacataaccgcggcttgcagctacataagggttagcaaatttttcggtatactcttgaattttttcctgtcttgcgagaacagggtcttctgcatttttaatatctcttttaaatataatattagctgcgcctgacggacccattacagcaatttcagctgttggccatgcaaataccatgtcagcgcccaaatgcttgctgttcatagcaatatatgctccgccataagcttttctgactattacattgatttttggaacggtagcttcagagaaggcaaataatagttttgcaccatgtcttataacaccgttgtgttcctgattaactcccggtaaatatcccggtacgtctgtgaaagtaacaagaggaatgttaaaacagtcacagaaacggacaaatcttgcacccttatcagatgaatcacagtccagcgaaccggccataaatttaggctgatttgctataataccaatggtagaaccattcattctagcaaatcctgtaactatgttttttgcaaacttatcaaacatttcaaagaattcaccgtcatctacgatttcttttattacatctctcatatcataacccttgttgacgtcaaccggaacgatttctgaaagtttgtcagaaagtctgtttaaatcgtcttcacagtcataaatcggagctgtttcaagattgtttgaaggaagaaatgaaagaagaagtttaacctgttcgaaacagtcttcctcagttgcgaatgccttgctggcaacaccgctttttacggcgtgcgtttgagctccgcctaattcttcaaacgaaacgtcttcgcctgtaaccgatttaacaactgaaggaccggttataaacatctgtgaagtcttatcaaccataaaaataaaatcacagatagccggcgaataaacagcgcctccggcgcatggacccaaaactattgaaatctgaggaactacgcctgacgcctgtgtgtttctgaagaagatatctccaaaaccttttaaagcgtcaataccttcctgaattcttgcgccgccggaatcgttaattccgatgataggagcacccatttttgttgccatgtccataactttgcaaatttttgccgcctgcatttcacccagagaaccaccgataaccgtaaagtcctgagcgtatgcgtagaccaatctgccgtccacggttccgtatccggtaacaacgccttcaccgggggcttctgtctttggcatattgaattcgttgcatctgtgtttaacaaaagcgtcaatttcaacaaagcttccttcatcaaaaagcattgcaagtctttcgcgggcagtttttttgccgctttcatgctgctttttaattttgtcagcgcctccgccttgttctatagtacggcgaatctgctgcagctcttctattttttccaattgtattacctccttgtgtttaaattgtttagtgatttaaatcacatatgttaaaattaattatttttctgttataaaaactttaatgatgtctgtttccagactttttagtgctgttatttttgcttctttggataccatttccgctatagtgaggtttctttttggcactggttctgatttttggttttgagtttctcttgtgtttttcagctgcgtctttaccgtagatactctcactgttttctttggatgattttttccctgttccgatttttttcagcatatttacttcagattcggaaagctttctccatcttcccaaaggtaaatgacccaaattaaggcctgcctctttggtgcgtttcagacgttttactatacagccaaccgattcgaacatctttctcacctggcggtttcttccctcatgtatagttatttcaagtttagttccgagctgggtggctcctataacttcaacttttgcagggcttgttcgtatcccgtcaatcactactccgtttctcagtcttgttaaggtttccatattaatattaccggtgacttcggcaacataagtttttggaatattgtttttaggatgagttatattgtaagtaagctcaccgtcgtttgtgagtaggagaagaccttctgtatcataatccagcctgccgacaggataaagcctgattggtatatcagtgaccaaatccataactgtgtccctgcctttgtcatcacttacggtagtgacaaatccggccggtttattaagcataatataaaccagctttttttcaattctaacaggtatatcgtcaaccattaccaaatcgttgtcttcatcaatcttaacgcccatttcggtaacagtttctccattcacacggactcttccggaacgaatgatttcttcactgcctctgcgggatgcaacgccgcagtcagcgagatatttttgaagtctgaccactgaatcaaaccctttcttttgtttttaactgcggctagattattagactaaaataaccgcatgttatcataaacgctttgcttactattatagcctatttaaaaattaaattcaataaaaaccgtaatataaatttgactgatattactgttttaaactaggtatatattagtatttttgtataatttttaacaatcgtatatggcaagcttgaatgctggctttaaaaaaacgcatagtataaaaattataattgatttccatgcagaaatagtcttgatttttatttacagctataaatagaattcagacaataatagttacataatgttgtctgtttcaatatcttaaactttttatagaactaacttatttttatttatttcgttaacagattttattattttgataaacaatcagtgatttataaagagtgtctgctttggaaaaaatattttttatagagtgctattttatataactaaatttatacaaaaaaggaggcagacaattattgtctgcctcaaaaatatattttatttttctgataaaggaatattaagctttgaaaaggtgcgcctaacaaagactatacatagaataacagaagctatttcagctatcggtatcgaccaccatacaaggtctagatttccaaactttgatagtataaacgcgaccggcaaaagaataattagctgtcgtgaaatagatgttacgagcgaatatattccctggccgagagcctgaaggattgataaagttactatacaaaatccagctgctataaaactgatacttattattctgagagccggaacacctattgcaatcatatctgacgaggcgttgaacattccaagcagctgtgtggggaagaactgaaaaatcagcaaaccaaaaatcatgattgatacagcgtatgttatgctgagtttcatcgtctttataattcttgaatgtttttgagctccataattatatgcgattattggaaccattccgttgttaagaccaaatatcggcatgaaaatgaaactgttgagtttaaaatatacgccgaaaactgctgttgctgttgcggtaaatccaataagtattttattcataccaaaggtcattattgatgatatggctatcataagtatggatggcagaccgactttataaatgtttgccacaatgttcttttgaggaagtatttttttcaggtcaaactttaattctttgtttacttttgcattacaaatcactgccagcagcatagctacgatttgaccaagcaccgttgcaagagccgcgccgcttacacccattttcgggaatcctaaaagaccaaagatgaatatagggtcaaatattatgttaattattgcgccaataccttgagtaaacatagtataaattgttttacctgtggactgcagcagtctttcacccattatctgcccgaatataccaaatgagaaaatacagacaattgagagatattcatatccgtattgtataatttgggcattgtctgtctggattctgaaaaaccaatgtgatagcgttgaaccaaatagtagcagtaccagccagttcataattgcaagaaagatacttatattagcagctttattcgcgaatttgtaatctttagcgcccagacattttgaaacgaaagagtttaccccgactccggtaccgctggctattgctatcataaggttctggacagggtatgcaagggatactgctgtgagggcattctcgttgatttgggcaacaaagatgctgtcaacaatattgtaaagagcttgaaccaacatggaaataattatgggaagcgacatacttataagcagtttgttaacgggcattgtacccattttattctcctttacggagtcaagtgtgtcaacttcagtgttgataatttttgttttgttttttgacattactttacctctattcttaaagtgtaagaactattctaacatattatagaagaaaatgtcaaataatttatgttgaataaattttatctcttattgtttgctattatatgatgaatggaaagaaatgctgaaaaataaagatgtgtttctgccggtataattattttattgttaacaacagtacctatagttcttcaagtccggttattttcatttttccgccgctgaaacttacagtatatttgtacttttcacttatatctttgactgagccgtctttatataccactctgatagttgaacttcgtataacggttgccgcagtgtcagatattttttctccgccgtagcaattcaatgaaagtatttcttcgctttctacggattgacggatttgtttatggcttttgagttcctggtcagcagcagaacttgagaaatatacatcaatatatgaagtatcccctgtattgatgccgttaacaaatgaaacaagagcgccttcaataaagttttcagcagcattggtatcaacggaagcggccggttcctgattgtatgagtaggtattataataattgtttacaggcggcgcttccggctgctgaacaactattacctgaggcggagctgtcggcggtgcgggtggagcaggcgtagccgtagccgctgctgtttcagttggtttagcgttaaaagaattaaatgatattatcccggttgaaaataaaaggataaaaataagggcaaaaactaaaataactgataataacgaaactgttacgattaaaccagtgtttgacttgccatgtcccggaccctgttcattataatttggattatacaagcaaaacccctcccaaagtacgtacttatatattcacattatataccaattgtagaattttgtaaatatttattatcattaaaaacaaattaatactataattaaaatatatgaaataaaaaatattacttattttataatagaaaaattgtgtctcacactgaaaaaagtctttttatatagttagtttagggctgttcagttatatgtgcatatagtatttaaattgtctttggaaacaagttatagagtttatttatttcagaaatattaaaacaatttttacttcagttatttggataacagaaacgccctaaaataatatagggcgtaattaaagctttatttatattttttcaacttcttctttaataaacataatacaaaagctgataatcagaagaagacatgaaaaccaaattgcatgaattccatatattttagtaagcataccgccaagaccggcgcctgcggcaaaagtcagtaacacgcaaaaatagtagagcgattttctaagaacacttttttcttttgtataaaaaaaggtgtaaagtgattccatagcacttcttatgtttccgatacacattgtgcttgcataagggtgaccttcaatttttcggaacgtataaacctgcatagcacagacgaatgatactaatgaatttgccaaaatatcaagtgagttcggaataaatcctacggttaaaagtaagcttatttctgcagctataattaactgtctccaatgaatttttttcatatatttaaaatggcggtgtattacttgtgctagatatattccggtaataaacgccaatatcggaattaagtagcgcactgcattatataattttccctgaaatatgtatgaactcatcagcacaatatttccggtttgtgcattggcaaatacttcttcacggcaacagtaagtatatgcgtcctgaaaacctcctgagagtgttagaaagacagcgtttataatggcttcagacatttgcctggattttaatgacgaaattattgtgttaagctgcttcatttaataacttttcaagtgtaactatttttactgacagggcaaatatttttgttgccagttttatatctttcatgtttgcaaatgtaggagctatacggatattttggtcttcagggtcgtttccgtaaggatatgtagctcctgccggagtaaatgccacgcccattttgctgcaaagtgtaactgtgtcggatgcgcatccctttaaggtgttgaacgagatgaaatatccgccgtttggttttgtccattcagctataccgagcccgttaagttcatcatttaaaattttgtctactgcttcaaatttggggcgcagtatatcagcgtgttttgccatatgagcttttattccggttatgtttttgaagtagcggacatgtcttaactggtttatcttatcaggaccgatggttgcatactttaaaaatccttttatatcaatgaggttggcaggactggatgcaacagctgatattcctgaacccggaaatgttattttgcttgtggagcagaattcgtaaaccatatcaggatttccggctttttcgcattcactgataatgtcaggaatatcggtttcttcattttgatatattgagtgcacgcagtaagcgttatcccaaaagattctaaagtcctttgctagaggttttaggttcgcaaacctttgtatggtttcgtcactgaaaactatacccatagggttctcgtattttggcacgcaccatattccttttattgtgtcgtctgatgacacaagtttttcgacaacatccatatcaggaccgttttcattcataggaacagggataagtttcattccaaaatgctctgtaatagcaaaatgacggtcatatccgggagcggggcacaaaaatttcctgtcctcaacctgacaccatggtttctctccaagaagcccatctgtcatggcgtggcttataatatcatacataagtgtaagactgctgtttccgcctactataacgttttcagggcgtgttcccatcatatcagccataagctgtttcgcctccgggattccgtccagccctccgtaattacggcagtccatgccgctttcagcgtccagaatacttttagagtttaccgtgttcagcatttccattgataaatttagctgttccttatccggctttcctctggataaatctaaattcagttctaatgctttgatttcttccatttctgatttcagttttgataactctttttttaagtcttcagtgcttaaatctaaatatgacacttgaaattccaccttttttataatttattgtattattttcttgacttatgacatttaataaatataatataaaagtataaatatgtaaaatgtattattgatattattattatatcaattttgtataattgagtgcatgtatggaggaaataaaatgaatattaactatgattattaccgtatattctattatgtggcgaaatatggaaactttactcaggcggcaaatatacttttgaataaccagcctaatataacccgctctataaaaaagcttgagaacgaattgggctgcactttatttgtcaggtctaatcgtggagccacgcttacgcctgagggagagaaattatttgctcatgtatctgtggcggttgaacaattgcgtgcaggagaggaggagttgtcgcgcgataagagccttcagagcggtactgttactgtaggggttagtgaaacggcgcttcatggcttgctgctttctgtgctgaataagttccgctcaaagtatccgggaatcaggatacgtttgtcaaaccattcaactcctcaggctatgtcagctctgcgaaacggaagagtggacttggcggttgtaacaactccaacggatgtttcaaaccctcttcatgagtataggcttacaacgttcagagaaatattagtgtgcggaaaggatttttcccatttgcagaacaaagttcttcaattaaaagacttaacaaaatttcctttaatttgtctcggtaaggaaacaaaaacaaatgaatttttcagcagattttttatgagccacggtttagtctttctgccggatatggaagcggcgactacggaccagattctgcctatggtgaggaataatttagggcttggttttctgccggatatttttgcggaacctgctattgaaatgggagcaatatatggacttaagcttcaggaaaagataccaaagagagatatatgtttgcttaaaaacacagaacgtccgttaagcattgcggcaaaagagcttgaaaagatgctgctgcaggaaaagacattattggaatagtcatataggttataaaataagcaacggtaaaaataagattataaatatacaaagtttttccatataaatatcttgcttttaatataatatcaacgtctaaaatatttatgtcttgataattgcaactattggtaaaataaaattaattgtatgatttgatatagcagtataaaaagtgtttatataagtatattcattaacgtttttaaatgtaaaataactatcaaattaatttggtataaatatttgctaaagatttgtttaatacatgcagcagagagtgttaaaaagattacgtgaataaaaacagtattaataagagctgtaaacactaaatttatttgcggtgtgtttaattcaatattggtttggctctaacaatatttattgagattttatatttttattattagaattatttagattatgagtttatgaaagtctaagattgcatttaaatttattttacttacgctaagaatttataagatataagttgtatataaaaatttttattaaatcaaaataacgccgcggtagttcaaattaccgcggcgttattttataattatattatgcttttccgtttgaaccaaacagacgtattttttcaattactttagcttttacattttctctggcaggtccaatatattttctcaaatcaaataaatccggtttttctgcaaatatctctctgattttatcagtgtatgcacatcttaactctgtgtcgatattaattttattaactccaagagatatagctttctttatactgtcgttatctactcctgacgctccgtgaagtacgataggcatatttaggtctttttttattgtgtcaagcctgtcgaaatcaagttttggtatacccttatattttccgtgagctgttccgatagcaatggccaaatagtcaacgtttgtctcgtcaacaaactttcttgcttctgccgggtcggtgtacatagcatccttctcatcaacagagatattatcttctataccgccgagacgtccaagctcagcttcaacagaaacgccaacatcatgtgcggcttcaacaactttttgagtgagagcaatattttcatcaagtgaaagatgagaaccgtctatcataaccgatgaccagccattttttaaacagttcataacagttttaaagctgtcgccgtggtcaagatgaaatgctacaggaacactggctttgtttgctgctgttgttattaccgctgaaagatactcatatccggcatatgaaatagcgccgcatgttgtttggataaataccggggatttttcttcttcagcggcttctataatagcctgggcaacttccatattaacagtgttaaaggcaccgactgcgtaaccgttcttgtgggcgtcatccaaaatttgcttacctgtaactaacataaaatttcctccaaatataataaattttttatttttctatatcattttcacgataataataatacatatattgttgggcaaaaccggcgtaattgccgtatttttctgttacaaagctgtcagtttccttttcctcaactccatatacctgatttaaaatacgttttatccagacgtctttgggaaacagttcatatcttcccattgaaaacaaaagtatacagtcggcaacctttccgccgacaccctttattttcagcagttctttttttgcaagttcagtcggcatttcgggaatatcttttaagttaacttcgcctgacgagactttttctgcggcgtccatgatatatttatcacggtaaccggctctgagacaagctaaatcttctatgctcagactgtttaaacgttcaggttcagggaaagaataatactctccctcaggaataccaagtttactgttgtatttaaaatcaatcttgtctccgaattcacggcacatagtctcaagtattttttttatcctggggatattattatttgccgaaattataaatgatattatagtttcccaaatatcttgatgaagaattctgattccgccgccgaaatcaatacatttttttagagtttcatcgtggctttcaagatatttttttatttcagaataatctgtatcagcggaaaaataatttgtccaatattcattatcagaatcagggcagtatattgtgtcgtttgacactctgcaaacctttccgccgcaaatgccgatatagccgttgtctgactggttccagcggaagcattgtccgcattcaaacgtatgtataggatcaaagtcctgttttaagtaaatcatttcttaatctctctatctgtttaatatatattcttgatacatggagggttttaacatatatgttcacatattttactgttatagaagtgtgatattcaatagattctttaacggtgtctgcaatttttctcgcttcttcaacaacattgcatggatatcttaaagacagctcaatgtcgagtatgagacggtttcctttagtagtgctgctttttaatttaagcaatttatacatgctgggaaaccgggaagtttcatatgaacaaatatcaaaaatcgctttatgagaaattttgtaatctcccaaatagctgtaagtggggcgcataacggttttttcttcaactatagtatggtttttgcgattaaaaaattgaaccatagggtctataaaatatccggaaaactgtttttttacttcaaatgtaggaacaggaatcacatgctttccgtgtttagttctcatttcgttagcaattttcatctcttcaggagttgatacatcttcaatataaataaacttttctattggagaaactccgatagcgtcagctattttattcgccattctctcacttgtaccaataattaaaagcgattgtatattatagtccgtgatggcctttttcacttcatcctggtgaatcttatcactaaaaattgctcttcgcacagacgcaactttagttggttcgcgttttgcacttttgccggctataatttgattatccgagaccagcaagccgtcgtctatgatataatcaatattattttcccgggcgacccacatactgtgatgtgattttccggttccggattttcccacaagtgcatagaccttcatagtattactccttgtcaagtttctctttattttcacattctgaaatcttatatgaaagcctcataagactgtcgcttaaatgaacgttttcaactattattccttctgtttcagcaagttcggtatatgaaaaattcataaatgcctttattcccatgcttattaagtcctcagcaacagctttcatagcttcctttggaactgtcagtatagccattttgggatgattttcgtctataaattctttaatgtccgcataatccataaccgtaaagtcgctgacttcagtgcctataacttcaggacttgaatcaaatattcctataagtttaaagccgcggctttcaaatttagtgtttgtggcaaaagttcttcccatatgcccggctccgaccaaaacagcggtataaccacgattgagaccaagtatattggcaatctcagtcctgagcatctcaacgttatagccgtagccctgctgaccaaacccaccgaaacagttgagatcctgcctgatttgagaggctgtaactcccattctctcgctaagttctttagaagatattctttcggttccgctgctgcaaaggtctgttaaatgtctgtaatatctaggaagtctgttgatgacagaacccgatacttttttatccattgtttattctccttaagtgcactgccgcaaatgcggcagtgcaaaagtagttcggtttgtgaagctggtcagaaaagccgtagtattatgataattttgacattacataatctgcaaactctgcagaagttgctccggtatctcttccggttatctgaagcttcttttcagtgtacatacactcatcaagagcgttttcaagcgccttagctttatcggcataaccaatatgctcaagcagcataacagcagctcttatgatactgcatgggtctgcatatatgtctcttccttcctgaaccattcttggagcgctgccgtgaatagcttcaaacatagcatagcgttttccaatattagcacttccggcagttccaactccgccctggaactctgcggcttcatcagtaagaatatcgccgtaaaggtttggcagaaccaaaacctggaactgggttcttctcttagggtcaacaagttttgctgtcatgatatcaatataccagtcgtccagttcgattccgggataatccttagccacttctttgcatacgctgaggaagtttccgtctgtagtctttattacgtttgcttttgtaacacaagtaacgcgtgttttgccagcttttttagcatattcaaaagcggcgcgtgctattctttctgttccttcatgagtttgaacaacaaaatctatagctaaatcgtctgtaacgtttactcccttagaaccaacagcataaccgccttcagtattttctctgtagaacgtccagtctattccctcttcgggaactttcacgggtctcacatttgcgaataagtcaagagccttgcgcattgcaacgtttgcactttcgatattcggccatgggtcaccctgtcttggtgttgttgtggggccctttaaaataacatggcactgctttaattcctccaaaacatcatccggaagcgcttggttaacttcggcgcggtgttctatagtacagccggtaatttctttaaactctacttttccggcttctgtttcgtcttttagcaagaactttaatattctttcagcctgctctgtaatagccggtccgataccgtcgcctccgacaacaccgattactatcttatcaagtgtgctgaaatcaagaaaatctttttcagctttcatcttttcaacacggttcagctgctcgctgagcacctgaccgaatttttcttttgcttctgtgatttgtgctgtgtagtccatttatatctcctcctgtatattgtctgtcttgcctgctttataagttttggttaagcattctctttggtgtaatttaaaagtccgccggcgagaagcatagctctctgacgctctgaaaggtcaagtttcgcctcaaactcaaagcctttagttttgtctgtaatttttattatatcactgtttttaacttgttctcttacgtttgcgatatacaagtcgtccatttggtcaactttgtcatagtcagcttcgtttgcgaaagtcataggcaggattcctgcattaattaagtttgccatatgaattcttgcaaaggattttgtcaatacggctttaacgccaaggtaaagcggagcaagagcagcgtgttctcttgaagagccctgtccatagttgcttccgccgattattatgctgcgtttgagctctaaagcgcgttttggaaattcctcatcgcacactgcaaaacaatattcggaaatttttggaatattagaacgcagaggaagaatctttgctccggcaggcataatatggtctgttgtgatattatcaccaacttttagactgcattttgcgtctatttcgtccaaaagcggttctgataccgggaacggtttgatgttaggtccgcgaagaacttcaactgtgtccattttttcttcctcaatcggaggaactaccatattgtcatttatagtaaacacttcaggcagtttgaactcaggcatatcgcccaaacttcttgggtccgtcataacgccggcaattgctgaaactgcggcaacctcaggagataccaagtaaacctgaccgtcctttgttccgcttcttccctcaaagtttctgttaaatgttctgagagaaataccgcctgaattaggtgactgtcccataccgatacaaggtccgcaggcgctttccagtattctagctccggcatcaatcatctttgaaagagctccgttttctgctatcatattaagaacttgttttgaacctggtgcgatggagagagaaactcccgggtcaacagtttttccatctaaaatatatgcaactttgagcatatcaagaagtgatgaatttgtacatgaaccaatacatacctggtcaattttcattccggcaagctcggaaatctttttaacattgtcaggtgagtgcggacaggcagccataggctcaagttcgctcaaattgatctctataatttcatcatattcagcgtcagcgtcagcgctgagaggtttataatcggcttccctgtcctgagcttttaaaaattcacgtgtaatttcgtcagacgggaatatagaggtagtagctccgagttcagctcccatattagtaatagtagctctttccggaactgaaagcgatttaacgccttcaccgcagtattcaataaccttgccgacgccgccctttacagacaaaattctaagaacttcaagtataacgtcttttgcggcaacccatgggttaagctttcctgtaagctcaactttaactattttagggtatgtaatataatatgtgcctccgcccatggcaacggcaacatccataccgccggcacccatagctatcataccgagacctccgccggtaggcgtatggctgtcagaaccaattaaagtttttccggggattccgaaacgttcaagatgtacctggtgacagataccgtttccgggacgagaaaaataaataccgtgctttttacaaacactgccgataaaacggtggtcgtcagcattttcaaaaccgctttgcagcgtgttgtggtcaatatatgcgactgatttttcagtcttaactctgggaactcccatagcttcaaattcaagatacgccatagttccggtagcgtcctgggtcaaagtctggtcgatacgaatacctatttcctgcccttttacaggttcgccctcaaccatgtggtctctcaatattttttctgtaagtgtcaaacccactaaaaatcaactccttttcaatatacaaatactttttaattgttatgtattcattttatattaacatgcccgaaatgtcaagcgttatgttaagtttttcacaataattacagtgtttccaaacagtgggattattgtgaaattgggctgtataaatgagaatatattgaaatgaaaatcatataatctccatttgtttttaattacaaacgttagtttgatgtgcctagcccggttgcgcccgccggacccgggcgccgacacatatttttttattttattatatattaaatatggagtaactttgttaataatctattaaatataaaaatatataaaaaataaataagaataataacaatagaatgtctatatggtttgaaaagctaagaataaaagcaaaaattatttagcaaaaaagtttatttagcaacaaatattagcaacaaataatggtttggaaaaagaattagactgtaggtaaagtatgaagtgtttggcaagatgcacaagacaagctttagccccgcttgctcgaggatttaagaggcagctttgcggtttcaagaagaataaatagcgtttatgagcgttgccatttctcagctcagattcaacaatagttccttcatcggaggaatcttactttgtttattcaatgtttctcgtaaaattacctttttatatgctaaaataaattaaaaatttatgtttattatatattttaaattactttaatctatgtttataaaagtaaaatgaaaactataagtatatgaaatgattttatctataaaatatttcaaaaatccgatttaaaatcacattcatatttaatattcttgaaaagaataaagtatgtcagcgcccgggtccgacaggcgcaactgggctaggcacaccaaactaacgtttgtaaataaaagtaaataaaatctatttattaatttcagaattattagtccgccctacgagataatcaatagaaacatcaaaataatcagcaatagcggttatagtttttagactgggttgtgcagttccgtattctaaccgttgtacagaattaggctgaatatttatttgtttggcaagctgcttttgagtaataccgtttgaaactcgcaaatttcttaatttattattaaaactattcattaaaatatcaccattcttaatatgaattatataaatgtgtcagcgcccgggtccggcgggcgcaattgggctaggcatatcaaactaacgtttttaaataaaagtaaataaaatctatttattaattttaggattgtcagtccgccccacgagataatcaatagaaacatcaaaataatcagcaattgctattaacatatcatacgctggtttacgggatccttgttcataattttgaacgcctcgttcactggctcctataaattcagcaagttgtttttgtgtgacattatttaatttacgtaactcttttaatcttgtacttaagttattcattaaaatatcaccatttttaatatgtattaaataaatgtgtccgcgcccgggtctgacgggcgcaaccgggctaggcacatctaactaacgtttgtaaataaattatagtttatttattaatttctggattcttagtccgtcccacgagataatcaagagatacattataaaaatcagctagggaaatgagtatatcaaaagacggacgttgatcatctgcttcataacgttgataattccgttctgtaataccaatattagaagctacttgcttctgagtatattttaatgatacacgcatttcttttaaatgttctccaaaattaaacataaaaaataacctttcaataaattaatatatagaagcgcccatgcacaaatttgtctgctcaaaagattgggcatatcaaactagtattccgtaaataaaagtaaataaaatataatctatttatataatttgggattgtcagtacgtccaaccaagtagtcaatggatacgtcaaaataatcagctaaagcaatcagcacacttgccgtaggttcacgttgaccacgttcatagtattgatatgctcttaatgacaaatttacatcttttgcaatatctttttgcaaaaggtttttatctttttttaatttaataagtctgttagaaagtttattcataaaataacctcacaaattttgtaaaaaagtattgacaagcataaacgtgcatgatataataagttcgaaaagagcacatgtgtgcattcgttgctttggaaagagatgatgcaatattatacatatataaaaatatctaaaaactatataatataagattatttggtgtattgtgtacatagtaaaacgtagttgataataatcttttgtattattatagtttaacatggtttgacaaaataaacaagccttttattgggcttgtattaaaaaattaaaagaggagggagttataatgagcttctttttggaccctttcagcaaagtaaatattcagcagattgcttcatttattatgtatggggatgaatttacgatacctacaaaaggttcttatgaacagagaatagaagaagcctggaattcttttgttgaagaggcaaaaaaattatatccggatttaaaagaaacagacaggatttttgactctattattttttatgcttcggtagttgaggaaatatatatggaagtcggtatgaggtgcggagcagagctggctgtaaaactttttgaaaaagatatttaatataattattataaagattatacatcataattattacacagcatgtaataatttacttacatgctgtgctaattattgtatctcgtaatcaattgacggttaaattgatatagaaattaaagataaaatagtggcattacttagtatgataaactttgaggttaaaatagctttaaacagtttcatgatttgttataatgttataaattatatatttgattataaaaatataattattatacaaaaataatcttaaaagttttgtgattagaaaatagatgtttagtttataaatcaaaacattctcatgtgttccagtttaaactttatatttttaaatcttttttacgggtatacacaaattcgaaatcagaccgtctttgtcatttatctcagaaggagacgtgatatattcaagaaacaagtgtccgttaaaatcgtagccgtttatctccatccattcagctattgatttataaatgtcgcatatctggtcataccagcctgtaaatgtaacgcaggctgtgagtgtttcggggacttccttaaatttaagaatttcagagtcatcaaacttaccgttgacaccaatctgtacctcaatatccgggctttcatctttatggtcattatccatatagacagcgacaggagggcagtcatttgataaacaaatgtcatttttagcggcaagtaagtagattttcttccacagttctccttcgtctttatattccggtattgtttctcttaatgctgccactgagcgttttggtactgtctttaattcaacattatattttggcatagtctcattcctttcaagttttttaatagtcttatcaagcgttaaaagccgtttttcaatatctgaatattcagcctgcatttttattcggcattcttttataacggtcagcatagcttcaggagaatagttcagatgtttaagaattttaatttcggatatacttatacccatatccctaagaagttttacattagatatttcggaaagctgtttggtttcataataacggtatccggtaaatttatctatataagccggggatagtatcccatgctcatcatagtagcgcagcatacgtatgcttaccattgacagccttgagaaatcacctatttttaacattatatttccttctttcgtacatgtacttttagctcgtatttagtataatacctaacactgtgtcagagtcaacagtattttttgttttttatgaaaataaaaatttttttgaaaaattttcaaaaaaagtcttgacaaaaataaaattaggtattataatgcaagagttgactttggttcccctcgtgtcaacaattttgcgagcatgctggaatcggcagacaggcacgtttgaggggcgtgtgcttatggcgtgtgggttcaagtcccactgctcgcaccattatattgcctgattgtgtaagggtagcacaaatgactctgactcattttgtccgggttcgaatcctggtcaggcagccataaagcgtttgacacaatgtcagacgctttttattttaaaatttctgattggcggcggttatattttgtttgataaattgaaacagaaaactatgtcagcaaacgagtatgtcaaaacttttgtaaagtggatgtttcttgctactataaccggaggttttggcggtatagtcggttccctctttaatatgtgcattgtatacgttactaaaatgagaaataaaaacagctggctgatttttttgcttcctcttggaggactgctgatagtgtttctttaccggatttgtaaaatggataaaaattcgggcactaataatgttatcaaatcagtgagaagcgaggaggatgttccgtttcttttggcgcctctgatttttataggtactactgtcactcatttatttggcggcagcgttggcagagaaggagctgctcttcagcttggcggcagtattggagaaatgacaggtaagctgattaagctgaatgagaatgatatgcacattataagaatgtgcggtatgagcagcgtgttttcagctctttttggaacccctctgactgcaactttttttgctcttgaggtcataagcgttggtataatacactattcggcttttataccgtgtcttttgtcggctgtgctgtcgtataaagtgtctttattgttcggaatcatacctgagacatacttgcttccatacatacctttgttatctatggcatctttctttaagaccattgctattggtatagtttgcgctgttgcaagcataattttctgcgttggaattttcggtacaaataagctttttaagaagtggcttaggaatccttatctgaggatttttgttggcggagttataatagttgctttaacattttttcttggaacaacagattataacggagccggaatgaatgttattgaccgtgctgttttagagggaaaagctttgccttatgcgtttctgctaaaaatgatttttacagctatcactattggatgcggtttcaaaggcggtgaaatagttccgacattatttattggagcgacgcttggctgcgttcttggaggactgcttcattttaatccggctttttctgctgcgctggggatggttggtatgttctgcggtgtggtaaactgtcctatagcctctgttttgctgagtgtggaattattcggttccggaggtattgtgttgtttgcgactgtggcagctgtaagttatatgatgtcaggttattatggattatacagcggtcagaaaatagtttactcaaaacttagaactgagtttataaatatatatacaaaaaaagaatattaattttgcggacattcagtccgctttttattttgtcccggcgtaatatgccgggattttttattttaaagaaatattttaaaagttaaaaatatgtataggtttttattgtcaatcgtattgtttggtgataatggattatcaggatataattattcagtgattgataatgattttattggtgtaaggcattatattttctgctattgtaaaaggcgtttttgacaatagattttattagttttaattcgggtaaaattaatgtcgatatttttggataaaaaacttttgggaaataaaggcggaaataaagtctttgtctaactctatcaggtagccgtttattaaggattaaattataaatgtggacataaatgatatgagattataaaggaggaaattaaatgaggtatgaaacagaacaaataggaggggctttggtggtcaagctatacggcgagattgaccagcattgtgtaagcgagatacgtgacgacattgacagacagattgctattaggaatataaactcattgatagttgatttgggcggagtagaatttatggacagttcaggaatcggtatgataatgggcaggtataaaaatatggtcagccgcggcggaaaaatgatgcttgttcgtcctcagccacaggttgacaaagttcttgaactatcgggtattaaaaaactttttgaaaagaattgcggataaaaaggagtgaataaaatgaataactatatgaaactggaaataccatcaaagaccacaaatgaagcttttgccagagcggcagttggggcgtttgcagctcaggttgatttaactatagaggaactgtccgatattaaaaccgctgtttctgaggctgtaacaaattccataattcatggatataaagacgcaagcggggttatatttataaattgtaatataagttgtaaggatgacaagtatactattgagatagttatagaggataaaggaaaggggatagaggatatagatgtagcaatgcagccgctatatactacctctccgaatgacgagagaagcggaatgggctttacagttatgcagagttttatggatagcttggatgtaaactctgttttgggagaggggactaaagtagtaatgacaaaacgcattggagccgaaaatacttatgactaaattttctgaagcaaacgatgaattgctgaaacggatttcggaaggcgatgagagtgcgcgggaggaaataatagagcagaatataggtcttgttcgctccattgttaaaagatttttaggcagaggccatgaagctgaggatctgtttcagattggctgtatcgggcttattaaggctgtaaataagtttgacagaagctatggcgtaactttttctacttatgcagtgccaatgataataggagaaattaaaaggtttattagagacgacggcataataaaagtaagccgtgcgtataaggacatatcatacaaggctttcactgtcaaagaaagaatgatggcggaacagaagacagagcccactttggcagaaatagcaaatgaattgaatataactcctcaggagctgtcaacagcaatggaggccgcaaggtccccggaatctttgtatgctcagactgacgacggaaaatctgaggggcggtctttgatagaaaaacttccgtctgacgaggattatgaacaaaaaatagagaaccgaatattgcttagtcaggcgtttaaaggaatggatgaaagagagaggatgataatatatatgagatattttaggcagaagacacagtcagaaattgcagctgttttaggtatctcgcaggttcaggtttcgagaattgaaaaaaaggttctgatgaaaatgcgtgataaattaacaggatgatatgtaaaatttgtatatcatcagatattttaggtcataataattccagacagaataaaatggaaaaggagagaatttttatggccggatctcaaaaaaataaaaatcaggaatatcttgactatgtaaacagaacatcgcccaaaagtccaatgctcaaaaatatgctgctggcatttttatttgggggtctgatatgtgtaataggacaagcctttggagatttatacaaaaatgtttttcacatggatattgaaaattcaaagacggcagtcagtataactatggtgtttttgggagctttgctgacaggacttgatatatatcctaaaatagcaaaatatgcaggggcaggtactatcgttccgataacaggttttgcaaattccatagcttcaccggctatggagtttaaacgagaaggtcttgttacaggtatgtcagccaagatgtttgttgtagccggaccggtgcttgtttatggtataacaagttcaattgttgtcggaataatatattatctttataagattttgataggaggttaaatttatggccgttcgtttaggaaagcagacaatagcacttgaagctccggtatctatagtaaatacagccacagttgtgggaaccaaggagagcgaggggccgttggctccatattttgatgttcatttgaatgacgcagagtggaatgaagaaacatgggaaaagtcagaaagcaaaatgcagagggaagctgcaaaactggcaataagaaaagccggaatggaacccggaaatatagattgtgcatttgcaggggatttgcttaaccagtgtataagctcaggctttagtgcgagagaacttgaaataccatattatggcttgtacggagcatgttcaaccatgatagagggattgagtttaggcgctataagtattgacggaggaggatttgacagaaccatagcggtagcgtcaagccacttttgtacagctgaaagacaatatagaactcctcttgagtatggcggacagcgtaccccaacagcacagtggactgtgaccggagcgggagctgcggttcttgaaaaaagacagtttccgccttatattacccatataacaacaggaaaggttattgactttggagtgacagaccccaataatatgggaggtgcgatggctccggcggcaatagatacattaaaagcgcattttagagatacaaagagatcacctaaaaattatgatttaattttaacaggagatttaggaaaagtaggaagagagatagttatagatatgatgacagccggcggatttgatatggaacaaaattataatgacaccggctgtatgatatatgattttgaaactcaggatgttcatgccggaggcagcggatgtggatgtgttgccgttactctttgcggatatgtttttgaaatgatgaaaaagggtgagttaaatgatgtccttatattgggaacaggcgcattgttaagcccgacgtcgtctctgcagggagaatcagttccgggaattgcgcatgcgatttcactttcaacaacaccaggaggcggaaaaaatggattatattaatgcgttttgggtaggcggactcatatgcgtcgcagcacagattttaatagataagacaaatatgactccggcaaggattttggtactgtatgttgttataggaacaattctcggtggaattgggatatatgacaaacttgtggattttgccggagcaggggcaagtgtgccgcttgttggatttggcaatgttttggccaaaggcgttatgaaagcggttgacgcgaatggtcttattggagtaattacgggaggaactgcggcagcagccggaggtatagcggccgcaatattctttgggtttttagttgcattaatttttgatccaaaagctaaaaaataatttaaaatacttcttaataaaagcatattactttataataatattttatatttaatttaagtttttgacttaagatttaaaatttaaatttaatgtgatttattattgttataagttgtcagttatttaaagtatttttgcttgttttaaataatatttcagaaatgtgacaaacgtttgatataaaccatttattgtttttattttatggtaaaccattaaaaattaacttaacatgaatgtcaatgttacaaaagtattaaaagatttttggttaggatataatgattaacgtatttccagtaatcccatagtttcttatatattacattttaaaatttgctttttggatattgaaatgataacatatcaatttgaaaagtaatatatatatgaaatcagagttaaaactttattaggaggtgggattattgatggagagcggtgcgaaacatgggcataaaaacagcgacgggacttttggaattatcaaaagagaagtcaggcttgaaggctccgctgaatgcgtagaatgtgtatttgagggatttctcaggtgttgttatgaaatagaactgagggaacatgaattggttagtatagaatatttgctgactataggacatgataagtttcgccattatggaattaaagcaataatgagaaataaggataatgatattttagattgctctgttgctgaaaataggtttgctacactaactgaatgtattattaaaatgcagatgctggctaaagacaaagtccttccatgcactttgccctatgtagtataaattaaaccgtgttggtttttgtaatataaaaaaagactgccgcattagcggcagccacagaaaccaatatatacataaataaaaatcagtttattctattgtttggttggtgttgtcaacctgagcaggtgcgcttggaacaatatttccgctgtttctcatttcgtttctattgtttcttacaatattaacacattgttctaaatctttcatagaagacataacgactttttcaacagtttcaagaagattgtctgcgtaattaaaggaagaatcagtaacttgctgtgcattcgaacgagcgttttcgataatctgattgccttgaacgatagctttttttgtaatctcgttctcgttgaccatggcaataatcttatcttcagcacttttaattaaattatcagcctcagtttgagcttcctgcaaaattctttgtctttcttctttaatccatttagcttgttttaaatcatcgggaagctttagcttaatctcttgaagaacgtctaaaagttcatctttatcaagaatacagcgtccggaaaacggcactgaagcgcctttgtcgattatatcctccaattcatccaacaattctaatgcatccatataaaatacctccttgaaatattaagccggtctagtattttgaattttcgaaacggctttttataatagggattaagttgtccggaacgagaccgttaagacatccgccatactttgcgatttcctttacgatactggaacttaaaaacatatattctttacttgagtgcagaaataaagtctcaagctcttcatataaggtttgatttgtaagcgccatttgaaattcatattcaaagtcggataccgctctaattcccttaataattatctgtgaatcaattttcttcataaaatctaccagcagaccggaaaacgatgttatttcaacattttctaagtcaccggtaacaagttttaacatttcgacccgtttttcaactgaaaacaaaggattttttgaattgttgacgagtacggcaacaactactttgtcaaagagttttgaagctctttttataacgtccatatgtccgtttgtgcaagggtcaaaactgcctggatataccgcagttctcatataatcacctctgcataaccgttattaccgttttgccatatctggatgattttaaaatgtcaaacccggtacttgttatgtcttcgccgtctgtctctgtttcggctactataattccattctctgataaaagattgtactcataaatcttattcagagatttaacaagaagccccttattatatgggggatctaaaaaaataatatcaaatccgtgtgtcaatttaaacggaatacttttgccgtctaaagttaccataacgtccccgtcaaatagcttatccaaaaaattaattgcgtcagtctgatataggacagaaaactcctgaagacctgaaccattaaggttattgtttaccaattctgcggatttgcgactattttcgacaaatacagcgtagtctgctccgcggcttaacgcctctataccaagggcgccgcttcctgcaaacaaatccaaaaccaaacggcatggaaaacgcatttgaattatattaaacagggattctttaactctatctgtagttggtctagtgccgtcaccgagcggagaagcgagcttatatccgcgttttttaccagatataatacgcaaaacaaagtcccccttgccggaaatagagttaagtaatatattctatatatttatatatcaaatttgtaattttgtcaagcgttttaaacaaatttgtaactattaccaaaaaaagaaaaaagtcgaaaaataaatataccccacgattgccgtagaatggataaggtaaaaacctggaaaccaggtgggatcgactcaaaagcattacaagtccactgaatacccaaaggtatgaggcatgtgcgccgcttactgaagttttgatcccttataaaaattgttggttttacattattgccataaatacgtacaacgcagggaaatatttaattcatatcatattatatcatatttttttaaaaatacaacatttttttgattttttttgttacaaatttttggttttgtatttaagaaattcatttcgttaatgttacagggcgtttcgggaactttacaacctaataacaaattattatttccaaatatttaggattgaaataaaaaaatttttagttataattaattctatattaacatagattttattgagtatcggccgggtggttaaaaactgccgtactttaaattaccatttgctataatttgtctgtttcgtattttgtatatcaattagactaatattttttgtggttattatagcagaaaaattttcagggagattgttttatgaagattgagaagatcaatgagaataaaataaaggttttaatcgacattgacgaagcgaaagagtggaatgtgaatataaagaacatagcgtcaaatacacctgaaattcaggagatgttttggacagcgcttcgtcttgccgagaaggatgtggaattttcagttgacggagcaaaattatttgttgaggctataccgggacagacagaggggtttggaatgcttataactaagatatttagtgataatgacctaaatttggctgtttcaaattgttcatataagggtcgtgtcaaaaaaagaaaattgacgcctgggaggaatgagtgtataaaaagggctttggggaaacgtatattcaggttttgtgattttgaaaatgtttgccaggctgcaagtgcggtttatcgggattttgagggagaaagcactctttataaacttgaagattcatattatatgctgcttcttccaacagacagctcttctattattgggatagaaaaggttatgcttgagttttccgataaacagtctaagacgcttatatctcacggcagactcaatgaattgggcgagataatgataaaagaaaacgcagtaaatatattatcagaatatttttcataaactacataaaatatactttataaattcaaaatcggcagagtaataatcactctgccgatttttaagttatagctcttaatattaggttaaaataagtattaggtattaggataaaatacagcgtctaataattaagatttgtcaaacaagattattaccggcgctgattctaataacaaaaaatcttacatacgaatctatactatgactttgtacttaaagaagcgcaaaatacatatggattatataaatatcgtatgttcaacttatttgataaagtaaaacaagttaacgaaaataactataatgaaaataaataaaaatgtggttttgcaagcatcggtagggaaaacgaagtttgccgcgtaaggcgcgcagccgcggaaaagctattataaaaaagtttatgttaatattaagcggattgtttgataaacctacactttcaaaaaattacttagttgtggtgtatattcttgaacaccgagtgaggtgatcagccatatcacgtgaagtatgaacatacttagaataaattgacatagttttttaataataaacttttccgcggcgcgcgccttacgcggcagatttcatctgccattcgaagcttgcaaaaccacatttttatttattttcattatagttgatcttatatttgccttaaaatttctgtccatatattataacatttccaataaatcagttttcaaattttgacagcttataatacctctataaaagttatattaataaaaattaaatgggtgtaaaatcaataatttgattttacacccatttttttagttttcttcatattaatgaaagattatgaatatgaatgatataactggattaattaaaacattttaagagaagggaagaacttttatggagaacaatgaatcaatgggaagacatactgtcactattgaagaccgaaaacgaataaaaataaattgcgttgaggacgtggagagctttaatgaagaaaaagtagtagtttatacaagcatgggcgtaatgatagtctccggatttgattttaaggttaaccgtttgagcgttgaggacggacagctaattatcgacggagaggtagacaaggtggaatatatggaagttgcagataatgacgacaggggaggctcaggatttttcggaaaactttttagataaataaattacggaggaaaaacagatggatacaattacaaaagcaaacgaattaaattactttttttggtcaatgatatgcggcgttgcaatgacaatagtttatgactttttgagagctagaagaagagaaaaaaagcaggttggattatttatatatatagaagatatagtttggttttgcgttttaggggtgctcgtatacttgcttgcattcagacagaatgccggtatgataagatggtacagtttttttggaataggactgggggcgcttatttataaactattgctcggcgacaaacttatgaacgtgtttagaaaatgttattcatattttgtcagggccttctgttttctaataaaaattataatgtggcctgttagatttatagcagctttaattaagcggccgattggagttgtagtgtggcattcaaggaccggctcaagacagctgtcagatatgatgaaagtgtctaaacagcggcttcgtaacagaatgagatataaggcaagaaaaacaaacagcagtgaggaagatgaataataaagctgtgattataaaaataactaataatgggtagaatatccaagtaattttgtattgtaaattatagtatttgagagactttttcattgacaaaacgtatttgataatatataatatccttgtaggtttgtaaatttattacataatcaaatagctgtgaagttttcactgctgttaggaggatgagcgtcggtgaattctgcgggagaaacaaggagaacagataaaaacagcagaaatttttcgtcggtaggcgcggccgctgcggatgttaaaagcagggcaacaaaaacgataaaaaagactaagaatgttaaattcaatataaaaaggctggttgtgtctgtagccgtactggttttctgtgtatattttgtttgcatgatgataggtcagcagagcacaatcaatcgtaaaaataacgagatacggaacctgaatgagcaaattacttcggctaaccaggaaactgaaaggctgaaggaagagcttgaaaatgtaaatgacccggaatatcttgagagaatggctagagagaagctgggacttgtaggtccgaatgagcgtgtttatattgacgctaacagcacaaactaaagttgagttttagactcacattttaattgagtattattaatttatataagcgagagtattctctcaggagggaaatttagtaagtatgcaaattgaagttggaatggttttaaatgtaaaggttaccgggattacgtcatttggcgcttttgttgagctgcctgaaggaaagtcaggacttattcatatctcagaaattgcatccgcttttgtggaggatgttaatcagcacttgaaaaaaggtcaggttgtttccgcaaaggttatcggtgttgataacggcaaaatcagcttgtcaataaagcagctggaatccggagaaaatcaagctaagccggaaaagaagccaaaagacagaacaaagaagaggacttcaagtccccgcagcaatcaaccgccggaagagtttgaattcgtgtcaaataagaatagaactgacgatttgagttttgacgatatgcttcaaaaattcaaaaaagacagcgatgaaaaattccaagatttgaagaggaacactgataataagagaagcggcggttataagagggcatactaacagattgtaggtgattttatgacaagtgccggtatattttggataattgcggcagttttgttcgctgtgattgaagctgccacagttgcgttggttacagtgtggtttgcggtaggagcacttgcagcggcaatagcagcgcagtttggagcaagtattttatttcaggtcggtacttttgttgtagtgtcggctattttgctttgcgttactcgtcctgttttcaaaaagatatctgtgaaaaagccgcagagaacaaatgcggacaggtttataggcgaagaggctatggtcattaaaaaaattgatgatataaataatgatggtcaggtaaaaatagcaggacaagtttggtcagctgtatcggaggataaaagtccgcttgaagagggaacaatagttaaggttattgctatcagaggagtgaagctggtagtagaacctattaattcataattttattgaaaataatttgattttataaaatatatttatgaggtgaagcagcatggtatttctaattatattacttgccataattgttgttcttgttgtggcaaatataaagattgttccccaggcgcacgcatatgttattgaacgtttgggagcgtacagcacaacctggagcgttggtcttcatattaaaattccgcttattgaacgagtagcgaataaggttactttaaaggagcaggtagttgactttcctccgcagccggttataacaaaagataatgttacaatgcagattgatactgtagtatactatcagattactgacccaaagctttatacctatggggtagagatgcctatgtcggcaattgagaatctgacggctactacacttcgtaatattattggtgatatggaacttgacgaaagtttgacgtcaagggatataattaatactaaaatgcgttcaattttggatgaagcgaccgacccatggggaataaaagttaaccgtgttgaattgaaaaacattatccctccggcaggtatacgtgaagcaatggagaaacagatgaaagctgagcgtgaaagacgtgaggcaattcttagagccgagggtgaaaagaagtcagctattttggttgctgaaggtgttaaagaatccagaattcttgaagctgaggcagaaaaggctgctcaaatccttagcgctgaagccgataaggaagctgctatacgcattgctgaaggtgatgctgaggcaatcagaagtattcagcaggctaccgcggatggaatcagaatgcttaatgagtctgagccgggtgaggctgtattgacaatcaagagtttagaggcgtttgttaaagcggccgacggtaaagcgacaaagataatactgccgtcacaaattcaaggtatagcagggctggctacaactcttaaagaagttatgaaggattagttttactaaaataaatatgttattattcatttgcacagatgattttatttcatctgtgcaaatgctatgatatagataaaagacttaaattacagagatttaaaacataggaggaaataatatgtcaggacattcgaaatgggcaaccataaagagaaaaaaaggagcaatcgacgctaaaagaggtaagatatttaccaaaatcggcagagagctaatggtggctgttaaagacggcggacctgacccggacacaaattctaagctgcgtgatgttattgccaaagcaaaagctaataatatgccgaatgacactattcaaaggagcataaaaaaggcagccggagaaggcgacgcaggaacatatcttgaaatggtatacgagggatatggcccgagcggaattgctgttatggtggagactttaagtgacaataaaaacagaacggcggcagaccttagacactattttgataagaacggcggaaatttaggacagagcggctgtgttggattcatgttcgacagaaaaggtcttatagttattgagaagaccgactctgttgatgaagataccttgatgatggacgctttagaggcaggagccgacgattttaatgttgaggatgagtgttatgaaattctgactgctccggaagcgctgggcaagaccagagaagagctggaaagcaagggttatacattcgcacaggcagaagtaaattacatacctcagaccactacgaaattagataatcctgaggacattgccaaaatggaaaaactgattgatatgcttgaagaaaacgatgatgttcaaaatgtttatcatacttgggatatgccggacgacgaggaataatattatttatactgagctgcaaaaaaacagagcggcggctgaaaatgcggcgtgaatctgtttttctgcggctttatttataggaggtggatttgtggcacgtatactgcatatggcggatatgcattttgattctgcctttacctcgaacctttcaattaataaatcaaaacttaggcgaagcgaacagcgtgaagtcttttcaaggataattgaaatggttaagaccgaacaaattgatgttatgttgatttcaggcgatttgttcgacagtgaaaatgtcagcgaagaaactattaactttatggttagaaaatttgctgaaatttctgaaatacctgtattgattgctgctggaaaccatgacccttttaatatgaattctgtttatgaaagaatcagtttaggtgataatgttcatatcttcaatatagaaggcggattttatgattttgaaaatcttaacctaagagtttccggagtcagctttggcagcgaggacggaagcaatattaaaactccgaaaacacttcatcctgaattttcgaatatacttgttatgcacggaaatgttgtttctggtactgctgagagcggaataagatataatcctgtgaccaaacaagaaatagaaaactcaggatttgattatatagcttttggacacgttcattcttttagcggtataaatgtagaaggaagaacatattgggcttatccaggtatacctgagccgcgcggctttgatgaaagcggagaaagcggagttgttataggaaatgttttaaaagcgggttcagaatttaacttacgtaaagttttaaagagaaattatcatacattagaaattgagataacggcagatatttctgataatgaacaaataatcgagcttattgacagtaagataaaagagtacggcaatcaaaatatttttagaataatccttattggtaaacttcgatcagactttttcattgatattgatttgttgaaaagcaggaccgaaaagcttggtttttttgttgaaatcaaagatgagacagaaatggagtatgatttgtcggttgatatccaggataacagtttaagggctgaatatataaggttgatgcagaaaaaacttgatgaatttgtgcacggaacacgtgaatatagaattattgagaacgctgttaaatatggtttggacgcgatagaaggcaggcttaaaccataaggaacggaggtgagcaagattagaattacccggttagaattaattaagtttggaaaattcgttgactattctattgatatcagcgatggaatgaacgtaatatatggggataatgaggctggtaaatcaactattcagctttttattaaatttatgctctttggtattccttcgagaggcggaaagagagaaaaaataaaagacagagagaagataattccgtggcaggataataaggccgccggaaaactctttttgataaaagacggcagagaaatagaggtataccgggagttcagaaaacgtccttccggagatatagtaaaagtaacagacagatatactggagaaaattattttaacaaggaaataaagtctgaagacgtcggcgttttgctgcttggaatgagcagacagatgtttgagcgcacagtttgggtaactcagagtagtatttgtatgcagggcagtgatgatgaaataactgctaggcttataaaccttttggagagcggcagtacaagtgatgtttcaattaaaagcgctgtcagtgggattgaaacaaaaatagcaggattaaaggcgaaagatggaagaagcgctccgggcgaaatagatttgcttaaccgagaacgtatagagttaaataaaacgctgtctgaacaaagggcatctgagagaaagagaaatgaagtaaatcaagagattaacttgcttactcagcgtaaattaaaaattgatgatgaaataaagcatcttgaagcggttgaaaaatccgagcgggcaaaagaaaaaatattgcgtgttgacaggatagatggctgtgttcaaaaagaaatgcaaattgctaacacaaggcagtttcagctttttaaacacaatgctgttcctgagagggttgaaagtttgcgctcagattctgagcatattgatgaacttgaggtaaaggcatatcagacgcagcaagaacttttagctgaacaaaactgttttgcagcagaagagaaaaagagaaaaagactgttatattttttaattggagctgccggattggctgtaattttagctgtgttaggttttgtattcggagtgggaaaaaatatattttattggataacagcaggagcagttgtattatttctaattgctgcaggaattattttcggttgcattattcataacaatatagtaaaatcaaaagaaagtttaataagtgttgacaatgaactttcacttataagaaaagagatctctgaaactgaaaagagattttcagaaagtctatccattttggaatgtgatactttaaatgattttaatgaaaaatttaggttatattctgagggtaaggcaaaaataaagatggtgagagaactttatgaagaactcttaggtcaagacgattatcaggagttaaagagagaggccgataatcaaagaaagtttgttatcgaatctgataatgttgaacctggtaatattgaacgaaaactggattcattaacaaatgaaaaggaaaagatttccgggcgtattttggagctgaaacagttaaagatagacggaggtttggaaattcctttgattgatattgaaaataatataaagtttattgatgaacaaattattgaaaaggaagaggaatattcatcataccaagcggcgaaggagggacttatccaggcgtatgcaaaaattaagtcggattacactccgctgctgaatgcagagacagaaagaatattaacccggcttacgggaggccagcatgacagtataaaagtggcagaagatttttcactcagcttaaaagaaacagataaaaatattgatttgaaacaggcggagttttttagtacaggaacatataatcagatttatttggcacttagactggcaataattaaacttactttaagcgcttcagactcagtaatatttttagacgatgttttaacaacatttgatgacggaagaagcaaagacgcgcttgaagtaatcagagaaatttgcattaaagacgggtatcagtgtttattattcacttgtcatcaccgtgatatagagagtattaaaaagtatcctgatataaatataatggaggtattattatgagcggaaagtttgataattcaagaggaaatgtgaaaatagcgaacagcgtaattgctaaaatagccggttatgccgcaacaagctgttatggagttgtgggaatggcaacaagcggtggcaaggacggtattgcaaaactgcttaaacgcgaaatgatggataggggcgttaaagtaaagttaggcgagaacggtatagatatttctctttatattattgttgagtatggcacaaacatcaatgctataggcgaggttataaggagcagtgtgaaatataaggttgaggaaatgtccggcttaaatgtgaatactgttgacgtaaatgttgagggaataagagttaattagagcggattttataagaaggagaataaaatgatacagcttgacagtaaaagtttaaagttaatgatagcttctgcgtcaaatcagattctaaacaatgtcgagaaagtcaatgatatgaatgtttttccggttccggacggtgatactggaactaacatgagtatgacgttcagtgcggcggctaaaagcgttgttgatttggataataaaaaatctccggttgaagtgttggaggttctttcaaagtcagctcttagaaacgccagaggaaattcgggtgttattttgtcacagattttaagaggtctgtggcagggagctgaacaatcaggagaacttgacgttagcggagtgaagcatgctttatgtgaagccagagacaccgcataccgtgctgttatgaagccgacagagggcacaatattaaccgtaatacgtgaaattgcggagtatgcggaagctcattttgtggagtatgatgatgtcactttatttttgaaagctgttcttgaggccggtaggaaaagccttgccaaaactaaagagattttgcccgttttaaagcaggttggcgtagtcgacgcaggaggatttggcgttataatacttctcggcggcgcggtaagcgctttggaaagcggcaaggcggcggaacttgaagagagcggcaaagcgaataataaacaaattgcatctcagggaattaaaagcgctgaagcagatacttcggatataaaattcagatattgtacggagtttttgataaataaagacagcgagcgaagtgccgcccagttgatggcagccattaaacaaaaaggcgattgtatgctggtcattgatgacgatgaaattgtaaaggttcatatacacaccaatcatccgggatttgtgctggaacaggctttgaagcttggtgagcttaccagtataaaaattgataatatgaaatatcagcataatgaaattgttaacggaagccagaaagaagatgaggaattttcagacaatgaaaccgaactgaagaaatatggatttgttgccgtatcttcaggtgatggtttgagccaattgtttgaaagtcttaactgtgataaaatagttgcaggaggtcagactatgaatcccagcacacaggatattttagacgctgttttagatgttaaagctgaaaacgtttttgttctgcctaataataaaaacattatacttgccgctgaacaggtgaaagaactggctgacgtgaatgtaatagttattccaactaaaaatatgcctcagggtatagccgctatcgcagtatttaacgaagacgcagacttggacgaaaacatttctgtgatgaatgagagtgctgatttggtgaaatgcggacaggtgacctatgcagtaagagacactaagattaacggagtggatgttgaaaacggagatattatggctgttattggcagtgatttgtctgtggtaggctctgatgttaatgaggtggcaaaagagttagctgaaaagctggtagacgaggacagcggtgtaatctctatatattacggcaaggatattgaaaaggagaaggcaacagaactttctgcttatttagagaacaaatattccgatttagatgttaatttaaattatggcggtcagaatgtctattattatataattgctgtggaataagtttatttttaactataatttatatattcagagatataataacctttatatctccattttgtttataaaattcaaaatcggaaagttatgatagcaactgataaatggtgtgatgaaaaatataagacaattttagcttcgtacatatttatggtaataatttgtttggtttgattgaattagataaacgacatctattttgaatttggactgtggaatggtgaatagttttgtttgacagattggctgagcggtgagaatggtctttacgattgtactaaaatgtttattaaaaagaccttcgaaaatttcactgatttatgctgtgatgagataataaatgaacagtgcttggattgaagaataaactttatggaaccgtgtattgttgattatggctgttaaaatgcaaagctataaaagccggataaaacaggactttaaaaaataaaaatgctgttaaaaggaagatttttatgttgcttagtgacagtgtgcagtatttaaaaggaataggagaaaaaagagccgagctttttcataagctgggtattttcaccgtggaggatttgttatatcatctgccgagaggatttgaagacaggacaaatataaaagatatttcggatttggcagaaggggaaacagtttgcgttaaaggcgttttggctatgggcttaagaaagttcagagcacggaacggcacttgggttattcagaccaggctctctgacggaagcggagttatgcagctgacctggttcaatgctccttatgttgaaaaatcgctggaggacccgtctgcagaatatattttctttggcagagtttcctataggagaatgtctcctgagatggtgaatccgataattgaaaaagtggacagcggaacttccaaaatgggtaaaatagttcctatatatccggccacaggaggattgcagcagagaagtatcagggacgccgtgacccaggcggttttaaaactcggcgaaaagcttcctgaatcccttcctgaagagataagacaaaaatacgatttaatagatatagagagagctattcgttcggtacatatgccggaaacttttgatgatttttatactgccagaagaagactggtctttgaggagtttttaaaactgcagctaggtgtggcaaccgttaaagcgcataaacacaaacagtctgcggttgttatagaaaatgtgaaatgtattgcggattttgctgcttcgctgccttttgagcttactaacgcacaaaagagagtaataaatgaaatatctgcagacttaaaaaattcggttccgatgaacaggcttgttcagggcgatgttggttcaggtaaaacaatagttgcggcggcgtccatgtttgctgtggcaaaatcgggatatcagtctgtcatgatggcgcctactgaaattttggcggaacagcattttgccggtttaaagaaatattttgaaccgtggggaataaaggttgcttttttaagcggaggacagaaggttaaagaaaaaagagaaaatcttgagctgattgaaagcggtgaagcttcggtcatagttggaactcatgccgtaatcacggataaggtgaattttgctaatttggctttgagtataactgatgaacagcacaggttcggagtcagccaaagaacaaaattggcagggaaaggaataaacagtcatacgttggttatgacagctaccccaattcccagaacgttatctttggttatttacggggatttggatatttccattatagatcagcttccgccgggaagaaaagaaattaagaccatagctctgacagaagccagaagagcaaaaatgtatgagtttattctccaggaattaaacaaaggcagacaggcgtattttgtttgcgctcttgtggaggattctgacgcggttagtgcaaaagccgcaactgattatgtaaaaagattaagcaacggtgttctaagaggaaagagcgttggtcttttgcatggaagaatgaagtctttcgaaaaggaagatataatgaaacggtttgcggcaggagaaatagacgcacttgtggctacaacggtgattgaggttggcgttgacgtcccaaatgcaacaattatggttattgaaaatgctgagcgttttggactttctcagcttcaccagcttagaggacgagttgggcgcggcgctgaacagtcgtattgtatcatgtttggcgaccaaaaaagcggtgtggctaaagagcgtatggcggtaatgtgtgaaactaatgacgggtttaaaatagctgaaaaggatttggagattaggggaccgggagagttctttggaacccgccagcatggtttgcctgaaatgaaaatcgggaacttttttactgacatggatattctcaaagagacccaaggagctgcggcagaaattttgaaagaagacccaatgctggaaaataaaaagtatgatatattaaacagagaagttgttaagacatttaataaagtcggcgatgttttaaattaatatttttatatagataaatttgtttaggatttagaatatatataatatattttgtgcagttgcttgaatttagttaattgaataaattgccggaactctattaggcattataatttaaattttttgtgattattcttttgaattagttttattatttatattagaggttctgatatttttttcaaaattataaagtttagtctgatatataaaattgtcagactaaactatgtttggtaattaacttttatatttaaatgctgctgtcatatataaaatatattatgtgttttattaataaaaattgatggtgttagttaagataattttagttgaaaaaaatcgctgtctgtgtagggatggtcatattttattgataagtcttcctgactaaccttattaaacccggccttttcatagaacttgtgtgccctttcggtatttttgggagtgtctagaacaagctctttaaatttatgctcatatgcaaaatcaagtaattcagcaaatagttttctgcctaaattataaggttttccgcggtattgctcatttacaaagaatttttttaatattccaataccatttccatagttcataagtccaatagtaccgactagtttattgttctctgatgcaatccaaaaatagccgccgtttgtgaaatattcctgatttatatttagcagttcaggttggtctgcaatactgactattggtcttgtgccatcattttggcagctcagcacgaggcggataacctcatcttgatatttgtcttcgtatttttttatttcaatcatttttgtttctctccaatatcttaaaatatcaaatgattttgaaagtcctttatataaatataaaaacagttttgctaagtatatagattgttaacagtaaaattattaaataataattttaaatcatttgtagtacaaaatcggaattgctgtatttatatattagtttagcaaataaaaattaaagttttatgtaaaatgggtaatatatttgaaaacttagcatttttagattatattatttttatgtataaagattatactgtatattttattgttcacttttatatttcttctataaaatgcaccggatatttatcccagtattttttatatacataacctttggcattatttatgtctaattgatacattctaaaaataacttttatatttttaggctgccattgttcctcatatgaatacttatatttcataccgacttttttcataacctcgccgctgccgggattttttatatcatgtgttgccgtaatatacggcaaatctaaagtttttaaatatttaattaatgcggccgcggcttcggttgtaatcccttgattccaatattcttttcttacagcatatccgaggtcatgactttcatcatggctgagttttatgtatcctatagggatattattagatttcagacatattgcataggttaaatctttagagttaattatattgtttaaatattcttctgcctcatcaatactgttaagaggaaacataggcagaaatgtgtttacctcattatcacttaaaagagtgaagagcgcttttgtatcatccttattaaactttcttaaaataagccgttttgttttaattatattatatttctgcataatattttctacctttattttattagttaatttccgcgtttgtatatccctgttatatttccgtattgaattatatgtccgtttgccgccgttaaaaaatctttcttttttgaatcgggactcaaatttaaaaaacagtcaagcgcgtaaatatgaaatatatatctatgacagtttcttataaaaaattgctgtttaggtcctttgtattgattacgcccgtatcctatcccttgcattgcgtttcccaaagcagtaacaagttttccatgaggtatgttttcaggtatttcatttaccgccggtatattccaaataatccaatgattaaatgcttttataaaaggaatatcaaagtcgtccataacaattgcaatagagacagcttctttacttaaacctgatatcgtgaatggaggagatatatcttcaccaaatccggtatgccttttggggataaatgaattgttgtcaaatgatttgcttgtaatttctaaagtattttctttaatagtcatgataaatcctcttttattttttctttaaaattgtcacggcagcataatgaagaatttcgaatttttcaggagcaattgtttcgagcatttttatatgttccttctcaaatttttcaatttcagcatccgtcagtgaggcgccgataccgcggcaggctttcatacgtccgttccaggatttcctggtaaaaggcacatttatatcaaacacttcgcttttttctacttcgaaatactctgtataatcatcatcaatctgaatgttatggcgggtttcccttccgcctgtccaatctggattatattttaaaataagattttcactttttcctgctatggcgtcttcaaacggaagccacgccatatataaaattacaaacttacctgatgctttaagtattttgtgtattttaggagcaagcacagggtgattaaaataatcaaagcactggcatgctgtgactatatcaaatgattcaggggcaaactgaagttcttcggcaggagaagagaaaaattcaatattcattttatctttttcggcgagaagtttagcttgttttatctgattttcagatatatctataccggtaaattttgctccgtatttatataagttgcgaggtaaaacaccggtaccggtgccaatatccaaaacattctgaccttttgtgcagatgccgttttttattagatactgataaaattcatcggggtaaatatctctgaattttgcataatcatttgaggtccttccccaatcgaaaccttttccgccgtcaatatttttattaataatcatttttacctccggtataaatatggtattgttttgtatttattttagcttatttagtaaatgatggtatgtaaatgtctttttagaatttgattaatgttttgtgtattataggaaaaacaattattatttaaaacaaatcatttgaaattatgacgtataacagcctagtaagaatgtgagtcatattatgtgattttatatttaaaaaatataattatcttacgggtatgtagtcaatagctgattcctcatcagttgcttcaagtttgaaaataaccggccgtagaccgtcattacagctgcaaattgctactcccggcgtttttatccaatcgccgtaataaaatgtacccgctcccgcgccatgcgccagtgcaaaaacatactgatatatagctttccaggcctcgtcgcataatccatcgggttttgcataatccgcgtagaaaacctgttcttttttttacattggacaggcggttaagttatcggctccatattccattgccaattctttatctaaggtggtttttaacactgttatttttacctttttcatatttgtgtcctctttataaagataaattatatatcaaaccgacctcagcattactgtcgctgaggtcggtttaaagaagttttatttttcaagtaatgattctccggtcatttcgtcaggtttctccagccccatcatatctagcaaagttggggttaaatcagcaagacgtccttcttttaatttagcgtcttttctgccaatcagaatcagcggaaccacatttgttgtgtgggctgtaaacggctcgcctgtctcatagtctaccatttggtcagcattgccgtggtcggcagtaatcagagcttcgccgcccatttccaaaagagcgtcaactacttgacctacgcagttgtcaaccgtttcaacggctttaacagcagcttcaaaaactccggtgtgccctaccatgtcacagtttgcaaagtttaagattattgcgtcgtatttgccgctcttaatccgctttacaacttcctcggttacttcaggagcgctcatttcgggctgcatgtcataagtcgcaactttaggcgagtttatcaatgctctgtcctcgccctcataaggctgttcaacaccgccgttgaaaaagaaagtaacatgtgcatacttttcggtctcggcaatacggagctgtgttttacccagtttgctcatatattcgccaaatgtgtttgacagcgactcaggcttgaatgcaactttaacatttggcatagttgcgtcatactgtgtcatagtaacaaaataggtgttgaaaaagtctctttcaaatccttcaaagtttggatcaactattgttctggttatttctcttgctctgtcaggtctgaaattaaagaagatgacggagtcattctctttaatggtgccgagtggctcgccgtccttttcaataacgcatgggacaacaaattcgtcagtgactttatcattataactattctgaatagcctcaacagcgctttcagctgtgtttcctatacctcttacaagagcgtcataagttttttgaactctttcccatctgttatccctgtccatagcgtaatatcttccgcttattgtggcaatgtcgccaacgccgatttcacgttcctttgcgataagctccttaatatattcctcagcggaggaaggggggacgtcacgtccgtcaagaaatccgtgtacatgcacatctgtaagtccgttcttctttgccagctctagcaatccatacaggtggttttgatgactgtgtacgccgccgggtgaaagaagacctaaaatgtgaagcgaactattgttcttcttacagttttcgatagctccaataagtgcttcgttggtgaagaaatctccgtcagcaattgattttgtgattcgggtaagttcctgataaacgatacggcctgctccgatatttgtgtgtcccacttcggaattgcccatttgaccgtcaggaagaccaacgtccattcctgatgcgtgaacaatagaggtggggcattctttcatatacttatcaatattcggcgtgttggcagcatatattgcatttccgtcatgacggctgttttcgccgaatccgtccataatgattaacgcgtatggctttttgctcatattcaatgtctccttaaattcgttttgttagtcagcggctttaatgatagctgcaaaatcatcgggtttgaggctggcgcctcctatcaaacctccgtcaatgtttggcatagacaagagttcttccgcgttgcctgcattcatgcttccgccgtattgtattctgattttttccgctgtgtcctcgccataaagttccttaatagtatttcggattataccgcagacttcgtcagcttgctgggctgtggcggttttgcctgttccgattgcccaaattggttcataagctataattatattttcagcgtcgtctttctgaatattcaggaaagcaagttttgtctgccggcatacggtttccggcataattccgttttccctctcggaaagactttcgccgacgcagactattgggataagaccgccgtcaacagcggctttagttctaaggttgacggtttcatcagtctcgccgaagtattgacgcctttcactgtgtccgataatagtgtataaggctcctgcgtctttcagcattgcggatgaaagttcaccggtataagctccgctttctttaaagtgaacgttttgtgctccgacgcttatgctgcttccttccagagctgatacaacacccggtatacaaacagcggtggggcaaacgaccacatcgcattttgcatctgatattttattgcggatttctgaagctaaaactgctgcctctgaaggggttttattcattttccaattgccggcaatgattttttttctcattaaattccacagcctttcttttatatatctcaactcttattgtataaatatatatacaaataataattagaaatgttcatataattttaaaactatttatataggataataatttatttatcatcaagagcagcgcatcccggaagaatcttgccctccaagaattccattgaagctccgccgccggttgagatatggctcattttgtctccgaatccgagaatatttactgccgccgcactgtcgccgccgcctataattgttgtagcgtctgtatctgccagtgcttgcgcaaccgcaacagttcctttagctaaaatcggattctcaaatacgcccataggaccgttccatacaactgtttttgcagtctttacggtatctgcaaaaatttctcttgttttttcacctatatcaagacccattttgtttgcaggaattgcgtcagcactaacggtttcaaccggaatttcagcgtcaatagggttaggaaattcagctgcaacaactgtgtctacaggaagaagcagagtctttcctaaactttcagccttttccatcatttctttgcagtatgagattttctcttcatctaccaaagatgttcctacctcataacctttagcttttagaaaagtatatgccataccgccgccgatgatgagagtgtcgcatttttcaagcagagttgaaataacattcagcttatcagaaactttagcgccgccgagaatagcaaccaggggtcttaccggattatcaattgcgttgcctaggaaatctatctctttagccagcagatatcccgaaacacaaggactgaggtattcagtaactccaactgtagaacagtgagctctgtgagcgcttccaaatgcgtcgtttacaaaaacttctgcaagagaagccaattctttgctgaaattttcttcatttttggtttcttcaggtctgaatcttgtgttttgaagaagaacaacgtctccgtcgttcattgcagcaacagcagcctttgcattttcacctacaacattgtcgtcatcagcaaatacaacatctttgccgagtttttcagacaggcttttggcaacaggcgccagtgaaagactttcaactacctgaccttttggctttcccatgtgtgagcaaagtataacttttgcaccttcgtcaacgagtttctgaattgtcggcatagcgccgtttattctcgtttcgtcagtgatttttccgtcttttataggaacattaaaatcacagcgtaccaaaaccttttttcctttaacttgaatgtcatcaacagtttttttattcattaaaatacctccaaaaatatgttaagatttaattatttttaatttgttaaaataaagtattaatgtaattaatttatttatgcttatttactaaggataattttaccctaaccgcctaaatttatcaaccctttttttctaaaaaaacttctcaaatttgtaaaaacagcagtcaagagtttgtgaatgttttaacaaattaaattataaaaaatatattgacaaattctgtaaacggtgttatcctaaaataagtatatgtatttttagtatacattatatattttacatattagggaggatgttcttgtgagaacaaaactaaaaactaaagatttggttatttctgcactattaatagccatcggaattttaataccaatgatttttacgggtccgccgtttagaattgttgtaggaccgtacagcgcaacgcttatggctcatgttccggtgattattgctatgtttatctctccgtggactgctgtgttcactgctgttggaactactattggatttttctttacagctccgctggttgttgcggttagagcggcttcacatatcgtgtttgcaattatgggcgcatatatgttgaaaaagggtatgaatcttactgttacaggtttggctaccggggtagttcatgcagtgtttgaaggaatagttgttcttatattctttgctgtaggcgcgtctacaagcagcagttattcaaacctggcgatgatgtggataacaataggaggaacatttgctcatcatatagttgattatgttatagccgttattgttggctctgccctttcaagagctcatatgataccgtcgcttccgccgatttggggcaaaaagcagcttgcaaaataaagtgttgattatttataccgccgtgtattcggcggtatttttttctttgatgattattgttcttgaaaatacagagcaaatatgatatattaatatctgttaagaaatgaggtgaagcagtaaaatggaaaacgagtttttaatgggaaatgaggcaataggtcttggagctatgcacgccggggttaatcttgtatgcggatatcccggaaccccgtctactgaaatattggagagtgttgcaaaacgcaatattgataaatcagtttatgttgaatggtcaataaacgagaaggcggctatggaagttgccgccggagccgcatatgccggagcatatagtatggttactatgaaacaggtcgggcttaacgttgccagcgacccgcttatgagcttagcctatgtaggaataaaaggcgcaatggtggttgtagtggctgacgaccctgggccaatatcatcacagacagagcaggatacgagaacgtttgcgatgtattcaaagctgcctgtatttgacccgactactcctgaagaagcttatgagatgataggcgaagcgttcgaatattctcataagtatggaacgccggtaatattcagacctaccacaagaatatgtcatgcgtgtgcttccataaagcttaaatcaggagatgaaataaggaaaaatacacctgacggatttgttaaggacactatgagatgggtgatatttcccaaaacttcatatttgaatcatataaagattgagaacagaaataaggagctttcaaaagttttttctgaagaatatcaaagaaatgagtattctgacaatggcgatacagttttgggtattgcggcaggcggagtaagctacgcttatgttaaggaggctttgaagcttttgggcgatcctaatgtacgccttatgaaagttgcgacgccgtttccgttcccggaagaaaaagcgattgagtttatgacaggattaaaaaaagttattgctattgaggaactcgacccggtgattgaaagggctcttttacatatttgcggaaagtatcatttagatgttgatattgttgggaaagagagcagtcatgtccagtgtgccggagagaatactgttgagagtgtaaaaaaagttatagcggaatttttggatattaaacttgaagagacgaagaatgatgatacagatatgcctgaacttccggttcgtccgccggtgctttgtgccgggtgtcctcaccgcgcttctttctatgcagttaagaaggctgctgagggaaagaaagctgtgttcagcggtgacattggatgttatacgctgggaaatgccaaacctcttgatatgactgacacatgtttgtgtatgggcgcaggtattacagtggcgcaaggcctccatagaatagaagatgatgctttaaacttctcatttgtaggagacagcacgttttttgcgtcaggaataaccggagttataaacgcagtttataatgagactgatataatccttgttgttcttgataattccacaacagccatgacagggcaccagcctcatccgggaaccggaaaaactatgatgggcaatgttgttgataaagtagatataaaaaagatattggaagcagtcggtgtaaaacgcgttgagaccaccaatccattagaccttgaaaacgctgtaaaaaccgtgcagtcacttatggatggaagcggtgttagggcggttatatttaaggctccgtgtattgcggttgccaaaccggacccaagctatacaattactgatagctgtgtgtcatgcaaaagatgtatcacagaactgggatgtccggctattgtgcttaaagacggagcgccgtatatagagccgtcgctgtgttatggatgcggtctatgcgagaaagtatgtccggttggagccatcaaaggaggcggagaaaatgaaagataagataaattgtcttctttgcggcgtaggcggacagggaacggttttggcttcgaggatgattgccgcagccgctatgaagagaggtttgtttgctgaaaccgctgaaacaatcggtatggctcagagaggcggcagcgttgtcagtcatgtcagggtcggcgagaatcagtattctccgctgataccatatggaaaagcggatgttataattggatttgagccggcagaggctgtgagatgcctgccttatctaaagaatggcgggacggttgttgtaagcagcaaagcagtgctgccggtgaccgccagtcttggtatgggaagctattccggttcagaagatatgctcggctatctggataataaaacagaaaatttgatagtcgtggatacagatgagatttgcaaaagattaggtagtgcaaaagtgatgaatatggtgctgctgggagcggcagcgtcttcaggcgctttaggcattacattagacgagcttgagtcggctatggccgagagattggatgagagattccacgagcttaataaaaaagcgctccgtgccgctgtgcaggagtaaattattcggagagtgagagatttattatgaaaatgacgcaggaacaatttgatattataaaggctcagattaaaaaacttacatctatggattgtttttataaagagaaatttgatggaattgatgttgattcgatacagtcccaggaagattttgaaaaacttccgttcacctggaagggtgatttgagagaagcatatcctttgggattaatggcggtacctgaggaggagatagtaagaattcattcgtcttccggtacaacaggaacccccgttattattccttacactaaaaaggatgttgaggattgggcaaaaatgtttgcgcgctgttatgagctggccgggataaccaataaggacaggattcatattacgccgggatatggtctgtggacagccggaattgggttccagctgggagcggaacgtttaggcgctatggtaattcctatgggacccggaaacactgataaacagcttcgcatgatgcaggatatgaaatcaacagttctatgcgccacatcgtcttatgcgcttctgcttgcagaggaaatagagaaacgaggaataaaagataatatctgtcttaaaaaaggggttataggttcggagcgctggggagaaaaaatgcgcggccgcatagctgatgagcttggtgttgaattgtatgatatttatggtttgacagaagtttatggacccggtattggtatgagctgtgattctaaatgcggaatgcacatgtgggatgattatatatatttcgaaattgtggatccgaaaaccggtgaggttttgcctgacggtgaggttggggaattagttataacaactttgaaaaaggaaggcgctccgttaatcagataccgtactcatgaccttacaagaattatgaccggggattgtccatgcggttcaaaatatccgagaattgacgttatactgggcagaactgatgatatggtaaaggttaaaggcgtaaatatcttcccaagccagatagaggaatttttgagtacaatcgaagatgcttcaagcgagtatcaggttatgatagaccatcttaacggcaaagatatcttcactctgtttgttgaggttaaaaacggaactgatatgaaggtttttgaaagaaatgtagttaaagagtttaaagaccgtataggaataacgataaagtgtaaaccagtattggttggagatttgccgaggagcgagaaaaagactgctagaatatacgataacagatattaatgtgataagtcctgaacagatataattgttcgggacttattttttataattttgcttgtgcaatatgcacaaaaatatttttgaacattgtgcagttttcggttgaatgttttattaaaatgagttaaaattaaaaagacagtttggaacgtcattatgttcctaaaaagtaataaaattatagtaaatattaaaatacatattttggagggctgaattttgaaacaatacgagacatcaaaaattaaaaatttctgtttgctgggtcacggaaactcaggaaagaccagccttgctgaggcaatgctgtacactgccggaaacattgacagaatgggaaaaacgcaggaaggaacaacggtcatggattttgaccctgaggagataaagcgtaagttttctatttctgcatctctcgcttcgtgcgagtggaatggtactaagtttaatatcttggacacgccgggatattttgattttgtcggagaggttcagcaggctttgcgggtatctgatgccgctattatagttctttcaggaaaatcgggtttgacagtcggagctgaaaaagcctggaagtattgtgaagaatatggtattcctaaaatgttctttataaataaggttgatgacgaacgtgtggattatcaaaaagttttgcagcagcttaaagataagtatggtaagaagattgcccctttccagctgccgcttaaagagggagataaaataaccggatttataaatgttgtcgagcaggaggctagaatatttgacggcaaccgtactataaccggagaaatgccggcaggtattgaaggcgagctggagccgctccgtgaaatgattaaagaagcggtggcagaacagtccgaggagctgatggacaaatatttttcaggtgaagaatttactttgcctgagatgtattccgctcttcgcgagggcgttgctgaaggcgatatagttccggttctttgcggaagcgcttatcataatcttggtataccatctctgcttaatgcaataagcgcatacttcccgtctcctaatgcaaaagaagactttataatagccaagaaaaaagacggcagcgaatcccgtataaaggttgacagcaacgacccgctcagtgcgttagtgtttaagacggttgccgatccgtatgtcggcaaaatgtcatactttaaagtcttttccggagtgatgactcctgatactacggtttataatatgaaccgtgatgtaaacgagaagataggaaagatttttactatgcagggcaagaagcaaattgaggtagagtgccttaatgcaggtgatataggtatggtctcaaaattatccaaaacaaaaacctgcgacacactcagcggacttaatcacccatatcagcttgagggaataaaatttgcaaagccaaatatggagcttgctgttgttgccaaaaacaagggtgatgacgataagatagcccagggattgataaaactgatggacgaggataaaacatttgcttttgaaatcaacaaggagactagacagcagcttttaaaaggtcttggcgaccagcatattgatgttattgtttcaaagctaaagaataaattcggtgttgatatatcatttgagaaaccaaaggttccttaccgcgaaacaatcaggaaaaaagttaaggtagaaggaaagcataagaagcagtcgggcggtcatggtcagtacggtcatgtatggatagagtttgaacctacggattcagaaggcttggtgtttgaagaaaaaatattcggaggcagtgtgcctaagggatatttcccggctgttgaaaagggtttgcaggatgcaatggagcatggtgttttggctggttacccaatggttggtttaaaagcaacgttggttgatggctcttatcatgatgttgactcctctgaaatggcctttaagatggctgcaaacttggcgtataaggccggtatgcctcaggcatctccggtaatattagagcctatcggtcatttaaaagtttatgctcctgatagttataccggtgatatcataggcgatataaataagcgccgcggacaaatgcttggtatggagccggtcggcgatggtataactatgatagagggagaaatccctatggctgaaatgcactcatatgcttccgatttaaggtcaatgacgcaggctcgcggcgactttgagtttgagtttgacagatatcaggaagctccgcagaatgttatagataaaattgtggaggagagcaaataaataacataataaattcaaatgttactgaacggactcagaaaaaattaatattatcaaatggcaccttctatggactattttaccatagaaggtgttttatatgtcatgaataaatgaataaaaaatagataataagtaagatgataagctttctttaacatttttaaataataaattttatgttttaattagtgttttggaaaactaaaattttaaggtcagataattcgcatttcatgctcagatggtggctcacctaacgcgcgaacttcgttcgcaatacatcacaactaagttatttattgacattgtaggctagataaaacaaagcactttgtatcacacccaccattcaggtggggtcacgcctgccgatgttcaccattttacccacttttattatatgtaaattaattatatatgtatttgatttcgaaactaaaatttatattataaattagtttatgttgtcctattaggttggtttgagtgaattttaattagttagttttataattcgcatttcatgctcagatggtggctcacctaacgtgcgaacttcgttcgccttccgatgttcacattatacccacttttattatatataaattagttatatatgaaattatatataaaatgtcaaatttatttttattaaactattcttctagtttatgaattattaataaacacatttattaggtaaaatttaaatcttaatcttattaaatgacacttttataataaaaaatattactaataccaaaaaacaattttgtataaataaacttattaattgaataactcaacagaacacattaactcttcaaacataaaatataaaactatataaataaaattaaaataatcaaactaaacaaaataaactaaactcaatttataatataatttttgattttgaaagtaatttcatatataattaatttcatataataaaagtggttaaatggtgaacatcggtaggcgaacgaagttcgcgcgttaggtgagccaccatctgagcatgaaatgcgaattataaaactaactaatcaaaagctatcaacctgacataaaatcaagaatattaaaccaaaaaatatacataaatattaatttaaattcgaagaataaaaaaatttatttttaatacataatcaaattagccataatttaacttattcacataaaacaaaatatttaagttggatttttaacaactgctatacaactatgcaaagattatagtgcacgaagtgttggcttgacatttacctaattgaatattagaataaaaacactaggattaaatccgtttttataagaaaataacctgcactggataacataaaattcgctgaaaagatagttagtagaaaatttggaattggagatactatagtgaaaaagaaaatgctggcagtaacattaattttatttatagggctattattttcaggaacaatttattattttataaaaaatccagctttatactcactatcaataactttcggtactatcttttatcattttgctatgcgtctggcagtgggttttttaataaataataagtttcacaatcatattgattacacgctaaaatggtttaaggaaagagattttgaacaaaaattttacatatggattcaaataaagaaatggaaaaagtgggttcctgtttttaatccgaaagattacgatttaaaaaataattccatagcggaaattatacaggttacctgtcaggcggaagttgttcacgaaattatcatgatattgagttttgtgcctgttatattttcggtatggttcggagctaatgcagtatttttaattacatcgtgtgccgcatttcttatagacagcatttttgttgttctgcagaggtataaccggccaagattaatgagactgttaaaagataaacagttatcaaataatttataaaaatcattaaattttattttgaataatatcatcttaaatcaacaaaactataattgccgaactatcttttaaaatatgtgatggtaatcatttgaatatttgaaaaattttcgtttggaaaattgatgtttactattaagcaaggggatgatacaatgagcgaagaaagacaaatttataccgaatatcttataatcggcggcaatggatttgtggatggtatacgtgatgacgcacctgaggaagccaaacgtgagtttgaaaagtttctcagaaagcaaaaagaactgaaaaaggatgagcagtaataaaatggccggaaaataggttgataatgaaatgttttggtttgtacaaacggtgcaaatcggtttgattaataccaaattccggccttttacttaattatttttttaattgtgtcaccggctttgctgattgtaaactgcacggctaatccaataaatgctcctgttattattgctgcaattattagatacggcatataccagaaaattcccggggtttgtgtaattaaagcggcaacagcaacttgtgctgtattgtgaataattgctccgatgatacttgcagcccataagtttttaagaggaagatattttaaaagtatcatctctgttaaaaggcataagagaccgccggttaaactataggcaagcatcataatctgaccgctgaaaacacttcccatagtgactcttaaaatcagtataataaatgcgtctgttgggcttaaaaatacaagtgcaaagagtgtaacaatattggcaagaccaagttttatgccgggtatggcaaccaacggcggaatttgagattcaagcacaaatatcgtcagggctattgctgtgagaatgccgatagatgtaattctgcggattgttttatgtccgatttgtttttcaggagactttttcatatcgtcctccactagtatgttattttccggttacagcgtctattacggaatcatcgttttcagtctttattttaacaactaatttatgaggcaggcagataattggataaacgctgtttttaattttaccttgtttgacgcaaagcctgtccgggcagttagaatcggatatagaaatctcatctttttctatatgaacggtattaaaacctccggcgccgtcgtcaatgtttatatcatatggattatctacatcgtttaaatctattgtctcaataactttaccgttttgcacaatttcagctgtttttataggaacgttttgtttgcttgctataaagattataaaaactgatacaatcgctaaaacagcaaaaatgattatgaaaaatttgtttttcatttttatcacctaagattaaaattatttatatcatcttctatactatttctcggattaaaaaaactatttaatctctttcattattagcttaggttatattttttataagagaattttttctcatccctcagctgtttaattcacttgtaaaaatttgcagtttataaaatataaacttcggcagggcggtcttagaccgccgcgagaggtgcgcagccgcggagcggcaaaggaacggcatgtcatattatctatctcgtattgccgatctagtgatccgtataaaagcggacaaatattgctcgctgtaaaacgtttgtgtgctcgctgaaaatttttataaagttaatgatttatataacgcaagcttcggcagggcggtctaagaccgccgcgagaggtgcgcagtcacggatcatgaaaagaacaggatgtcatattatctatctcgtattgccgatcttgtgagccgcataaaagcggacagacattgcttgctgtaaaacgtttgtgtgctcgctgtaaaatgtttataaagttaatgatttatataacgcaaacttcggcagggcggtcttagaccgccgcgagaggtgcgcagtcacagatcatcaaaagaacagatttcatattatctcgtattgccgattttgtgagccgcataaaagcgaattgtcgttgttcactataaaatgtttatagtgttaattatttattatgtcttatgtattctatttgtttttggcgtatttgtcaagtttttgtctgtgctgtcgaaatcttttgttatatttctatttaaattgggtcttgtctaaaattgacgtaaatggtatactgttattcaattagaagtatgtaaagttttattgttgtcaaaaattaagacatacttttgtgtgcctgttattttggagtgaaatttttttatgaattatactatgcttactgatttttatgaaatcacaatggcaaacggatatttggaatgcggtatgggagacaggatcgcatattttgatatgtatttccgtcaggctcccgacggcgccggttttgctataatggccggcgttaagcagctgattgattatctcagcagtcttgaattttcgaaggaagatattgagtttctgcgttctaaaaatatgttttgtgaaaagttcttagactatctttcggattttaaatttgaatgcgatgtctgggccataccggagggaactcctattttcccaaatgaacctatagtgacggtaagggggcctattatacaggcgcagtttgttgagacgatggtattgcttactataaaccatcaaagtttaatagcgacaaagagtaatcgtatagttcgcgcagcgaatggcattcctgtaatggaatttggctcgagacgggcacagggttatgacggcgctatatatggcgctagagctgcgtatattggcggagttgcaggaacagcctgcacaatttcagaccaaatgtttggtgtgcctgctttgggaacaatggctcacagctgggtgcaaagttttgatactgaatacgacgcttttaaggcgtatgcaaaatgttatcctgataactgtactttgcttgtggatacatacaatgttttaaagagcggtattcccaatgcaattcgtgtttttgatgaagttttgaaaccgatggggattaaaaaatgcggtataagaatagacagcggcgatataacttatctttcaaaaaaagctaggaagatgctggacgacgccggctggacagaggcgtctgtatgcgcttcaaattctttggatgaatatattatccgtgatattttgctccagggggctaagattgattcatttggtgttggcgagcggttaattacttcaaagtcggaacctgtgttcggcggtgtttataaacttgtagctgttgaacaccagggcgaaataattccgagaattaagataagcgagaatgttcagaagattactaatccgtattttaagaaggttgtaagactttattccaatgaaaccggaatggctatagccgatgtcttaaccacatacgatgaagtgattgacgacgcgctgccgtatgagatatttgacccgcaaaacacgtggaaaagaaaggttataactgactttaaggctgttgaactgcaagttccgatttttaaaagcggaaagttggtttataagtctcccagtcttgaggaaataaaggcatatgcagaagaggagctttctttgatttgggatgaagttaagcgttttgagaatccgcatacttactatgttgatttgtctcagaagctttgggatatcaggtatgatttgctgaaagcttacaatgcgtaaattggcttaatttcaggaaagctaaaattaatttgagagttattaattattaaattttataaaggaaaggtactttatgatgcagcaaaatccggtagaattttataacttaggaaagcttggaataattggtatgaaagggtgcgaagatatcgctaagaaaatagatatgcaccttaaaaagtttaatgagaacagcatgcctaatattgaaagttttcttattcctacaaattgtcccagatttggaacgggcgaggcgaaagcagttatatcgcattcggttagaacctatgatatttatattatagttgacccgtttaattatggagtgacttacaacatgtatggcgccgagcatccaatgagccctgatgaccattatcaggatttaaagagagttatatctgctcttggcggcaagccgaaacgtatcacagtcattatgcctatgatgtatgagggcagacagcatagaagaattgccagagagtctcttgactgtgctatgatgcttcaggagctttcaaatatgggggttgataatttcctgacgtttgacgcacatgattcgagagtacagaacgctataccgctgaaaagttttgagaatgttcgtcctacttatcagatgataaaagcctgcctcaagtataattcagacataatcctggatgcggaggatactctcatagtatctcctgatgaaggagcaatgggcagatgtatgtattattcttccgtgcttggtatggatttgggtatgttctataagagaagagactattcaaaaattataaatggaaaaaatccaatagtcgcacatgagtttttgggcaaggatataaccgataagaatgttatagttgtagatgatatgattgcttcaggcgagtctatgatcgatgttgccagagaacttaaagccagaaatgccaagagagttatagtattttcatcttttggtctgtttaccgagggtgttgacaaatttaacaaggctcatgaaaatggtctgattgacgctgtgtttacaacaaatcttgtgtatagaagacccgagcttaaagactgtgattggtatcatgaggttgatatgtctaaattcattgctcttattatcaagcaaataaatgaggacaagtctataagtgagcttctgactcctatttgcagaataaataatattcttgagaaatataaaaatttaagaaatcaagattcacagaattaagtttatacttaaataagattatagaaagtgatataagatgactgataagactattaataaagcgggttctgtacgccgcgtcactgagacagagatggcggagcagagggattacatatccagaatacgcgcaatattagcacagagaaatgataaaccaaaagcttttgttgaaacttatggttgtcagcagaattcaagtgattctgagaaaatcaaaggtatgctctcggatatgggatatgaaatcactgatgaaattgacggagcggatttggttctttataacacctgcgccgttagggagaatgctgaacttagagttttcggaaatttgggagctttaaagcataaaaaacgcaggaatccggatatgataataggagtatgcggctgtatgatgcagcaggagcatattgcaaatactataaagacaaaatataaacatgtcgatatggtttttggaactcacgctttatatcgttttccgcagatattagatgaagcattaaaacatacccgggtttttgatattgagaatgaagacggagcaatttttgaagaaataagcgttaaacgtgacgctccgccgcttgctaaagttccgataatgtatggctgcaataatttttgcagttattgcgtggttccttatgtgcgcggccgggaacgcagcagaagcgcagaggatattctcgcggagtgcagaagagtggctgacgagggttataaagaaataatgctgcttggtcaaaacgtcaattcttatggtaacgatttgccgggcggaactagtttcagcgagctgttaaagctggtatgccggacggagggaattgaaagaatacgttttatgactagtcatcccaaagacctttcggatgatttgatagaggttatggcaagcgagccgaagatttgcaatcagctgcaccttccgattcagtcaggttcaaacaaggtgttaaaagaaatgaaccggggatatacgcgtgagcagtatatggaaagactaaaaaaagtttgcagagctattccggatatagttttaacgaccgatattattgttgggtttccaaccgagacaaatgaagattttaatgaaacgctgagcgtactcaaagaagttgaatatgatatgattttttcattcatatattcaaagcgcgtcggcactccggctgcaaaaatgccggatgttctgactgatgaggaaaagcatagaaattttgatgaaatgctgaaagtgcagaatgaaatctcaaaacggaaaaatgagacttatgcaggaaccgttcagaaagttttggttgagggattaagcaagacgaatgataaaactctaacaggcaggacagagggcggcaaggttgtgaatttcagctgttctgataataacgatttaagtttatccgactatgtggggaaaatagttgatgtaagaataacgtcagtgcagacgtggtctttattcggcgaaacagagaattagaaattatatggtaataccttaaaatcaaatgattttaggattatataaaaatcaaaggagaaaaacatgaacaataatgatgcgatatttgaaaaggcaagagagttaggcgagcttataaaggcaagcgacgttagacaaaggtcagaggaagccagcaaggctttgctttctgatgaaactgcaaaagggcttatagattcatataataagctgagagaagataaaatggcggagtttactgaaaagcagcctacacaggaagaagctcaggaagtaaataacgtacttcaagcagagtttgagaaaatggctgaaaatgatataataaaagaatatcttgaagcggcaagaagttacgaaatggttttgggacaaatggacagcattttgaaacactttatagttggcgagcaagaaaaccaatgcggcgagggcggatgtgctacatgcggaggctgccactaaaatatggcttatccggttggtcggccggctggcggcgtgttttgcgtttgtcagccggtattattatttatgactaaacttagagttttatttccaggctgtgacataatttaattagataatatatttgccttttaaatagtgaaagacgatattgacactttttataagtttatattatacattttgattcagtaatatttcggaagggagcggtatttttatatgataattgacagaaataatctgacgccgatgatgcagcagtattttgaggtaaaagaccaatataatgactgtatattgctttataggcttggtgatttttatgagatgttttttgacgacgctgtaattgcgtctaaagtattggaaatcgctctcacaggaagggcgtgcggtcttgaagaacgcgctccgatgtgcggagttccgtttcattctgttgacagctatattgttaagctggtaaatgccggtcacaatgtggcggtatgtgaacaggctgaagacccggccgaagcaaagggattggttaagcgtgaggttgttagagttatcaccccgggaactataatggatacctcggcacttgacgaccaaaagaataattatctgtgttcattttttagaagcgatgatggtataggtctggcttttgtggatattacaacgggtgatgtttatgtcggtgaatattccggcaaaaacatgatgaaccttgtaatgaatgttataacaagatttgttccaacggaattcattatgaatatgcgcgcgtatgaaaatacggatttagtgaaaacattaactgacaagttcagctgttttgtgagaaattattatgactggtctttttctgaggaagagtctaaaaaggctgtcagcgaccagtttaatgccgtgcgcgaaggtgacggcgatatacttgaagagcttggaattaacgagatgagtatggctgtttcagcattgggcggaattttggcgtttctgaaagaaactcagaaggctgaacttaccaatattaaatctgttgaggttctcaacgacgacggcgagatgcagattgatatgtacagtatgagaaatcttgaaataaccgaaactatcagagaacgttctcagagaggcagtctgcttaacgttctcaataagacaaagacgtcaatgggcggaagaatgttcagaaagatgataaccgctcctttgacaaatagaatagcaatacaaaacaggctgatagctgtggacgagttttataaaaatcaattgtttagagaagagattatagatattctgaaaaatatttcggatatagagagaataatcacaaaattggcatataaaactgcgaattgtcaggatttaatttgtttaagaaattcttttaaaaggcttcctgaacttaaaaaatatcttgagcagagttcgagcaaattggtgagggaacagctgaagagatttgatgatttgagcgatttatatgagctgatttataaaacgatagatgatgaagctccggcagttctgaggaatggaaaactcataaaaaaaggagctgaccctgaactggacaaaattagggaaataaagcaaaacggtcaggattggcttacaggtattgttgaagaggagaaaagaaaaagcggaataaaaaatatgaagcttggttttaataaagtttttggttattatattgaagtcagcaagcagagcaacgaaaatattcccgattactttatcagaaagcagactctggttaatgctgagagatacataactcctcaaattaaagagcttgaggaagaaattcttgaagccggtgagaaggtcaatgatttggagtataatattttttgcagaatacgcgaccatgttgctgcgagttacggcaggatacgcgagacttcagacgttatagctctgatagatgttttgtgttctttggctgttgttgcggaatcaaacggttatgttatgccgactgtaaataattccgataaaataattataaaagacggacgtcatccggttgtggaatcaataagcaaggcgaacgtgtttattccaaacgacacaagtatggataatgagagcaatcagatatctataattacaggcccgaatatggctggtaagtctacatatatgcgccaggtggcagttatagttttaatggcgcaaatgggaagttttgttccggcttcatcagcagaaataggtattgtggatagaatatttacgagggtaggagcgagcgatgacctgagttcgggagaaagcacgtttatggttgaaatgaaagaggttgcttatatactcaataacgccacaaaaagaagtcttataatccttgatgaaataggccgcggaacaagcacatatgatggtctgagcattgcctgggctgttgttgaacatatagccgacgcgaaaaagtgcggggctaaaacattgtttgccactcattatcatgaactgaccgagcttgaagacaaaataaacaatgttaaaaattattgtatagctgttaagaaaaagggagacgacataacgtttctcagaaaaatcatccgcggcggagcggatgagagctacggcgttgaagtagcggctcttgccggggtaaagaaatcggtaatcatccgcgcaaaagaaattgccggtatattagagagcagggaacagaaaactgtcaatacggccgatattaaaaccggaaccaagaaagaaaagaaaactccgtttaaggatgaacagatagacttttttgcccaggctgataatcctgtaataactcagcttaaagagttggatcttaatacaataacgcctgtagaggctttgactaaactttttgacctccaggcaaaagctaaaaatatgtgatttaaagccgctgtgcgctgtgtgcggcggcttttggtatacgctgtaaaaagttgacatcattaaattttgatgatatacttcaaaataattagagttttgggaagtgtttatatggaagaaaaaatacatgttttatctcctgatgtggcggataagattgcggcaggagaggtggcggagagacccagctcggttgttaaagagctggttgaaaatgctgttgacgcaggagcggataaaataacagttgaaataaaaaacggcggtataaaattaataagggttgcagataacggtaagggaattccgtcagaacaggttcctacagccttcctgcgccatgctacaagcaaattaaacactgccgatgacttatataatatctctacaatgggatttaggggcgaagcgctttcgagtatctgcgctgttgccaaagttgagattatcactaaaactgccgaagccgaaacaggggttcattatattgttgaccacggtatttgcggagaagctgatgaaatcgcttgtgcggacggaactattatgatagtcgaagatttgtttgctaatgttcctgccagaatgaagtttttgaaaaaagacagtacagaggcaggatatatatctgaccttatgacgcggctggctttgtcaaaaccgaatatttcatttgattatatatgtgacgggaagcctgtgtttaagacgtcgggagacggggatttgactaatgttattttaaaggtatacgggcttaagtttgcaaaggctgttatgccggttgattattttgaagacggagttaaaatatcaggggttatcggtaaaccggaactgtcctttggtaatcgtaccaaacagacgatttttgttaatggcagatatataaaaaatcatgtgatagccaaagttgcggaagaagcgttcagaaacgctgtaatgataggaaagtttccgttttttgtattaaatatagaggttccgccggaaatggtagatgtcaatgtgcacccggctaaaactgaggtcaagtttgcaaatgaaaaacagctttacgatatagtgtatcatgcggttaaaaactcaatgtatggtattaaggttagtgaagtaaaggctgaccagagcgctaaaactatacaaacaaataaaactttttcaaaaagcaaagaagcgcctaagctgaaagattcagcggtcttaaatgaaaaggtaatacatgattatcttgagtataccaaacctgttataaataaatctgaaattttagataatactcctttagaaaaaacgcctgatgaaaatatggatgaaaatgctgctgaaagttccgataatggcggagttttagacaaagttgtggatataatagataattttttggaacctgacaaagaagaagtatctgataatatctcaaatgatgtaaatgaagcaactccacaaactaaaaaagagtttaagcaaaccgagttcggagatgttgataagatatttgataattcagacagtatttttaaagattataaaataataggacaagtttttgacacttatgttttgctgtcagcgccggacaggttttatatgatagaccagcatgccgctcatgagagagatggttttgaaaagctgaaaaaagcgtattttaataatgaacgattatctcaggttttaatgtcgcctattgttataaatttaagccatgttgagtatgacgcggttatgtccaatcttgatgagtttgaacggtttggttttgatgtcggcgagtttggctttaatacggttgtagtaaatgagacgcctataatagccggcgacgagcagataaaggatttgtttttggaaataacagacgcgcttgtggataatattaaacatccgatagcggattttgaagaaaaagcgcttgatatgatttcatgcaaaaaagctattaagggaaatgataagctgtcgctgccggaaatgactgaagtcattaaaatagttgaaaatttgtattctaaaggtataaaaacctgtcctcacggaagaccaatcatggttgagtttacaaaaaaagagatagagaagatgtttaagcgtatcgtataaaatgatacaaggattatatgaggtggcgtagatgaataaacctaaaatattgtgcgttgtaggccctaccgcttcaggaaagacagactatgctgttgagcttgctttaaaatgtggtggagaagtggtttcgtgtgattctatgcagatatataagcacatggatattggaaccgcaaagccgactgctgatgagatgaaaggcgtcaagcatcacatgatagatataatcgagccaaacgagagttttagtgtagcgcgtttttctgagatggcaagggaatgtatagacgatatacttttaagaggaaagatgcctgttttatgcggcggcacaggactatattttgacagcacaataaataatataaattttatacaaatggacacggatgaagagtatagaaaagatttggaatcggctgcaaaggaatttggaaatgaatacgtatataaaattttaaaaagggttgacgaagaatctgccgaatccattcatcctaataatttaaaacgtgtgattagagcgttggagatatataagactaccgggaagaaaaaatcggaactggataaggaacagctgtcagaaccattgtatgagcctgaaatcacagggcttatgcgtgacagggaagtcctctatgacagaataaataaacgcgttgatataatgatggaaaagggacttgtagatgaggtttcagaccttattaaaattggtatagatacagaagctacatctatgcaggctattggatataaggagataatagaatatttggacggaaagacaagtctcagcgacgctgttgataaaataaaaagagaaagccgaagatatgccaaacgtcagctgacatggtttaaacggaatgaaaaaattcattggataaatatttaaatataaaattaatgcggtgtatgaactctaagtttgtatgccgcattttattttttggaataattttacaggcagcgacatttttctgttacaattaagttacatttgttctacaactcgtggattgcggtttacatactttttgacagagattataatagttattatgtagaatggatgtgtatgtttagcgctataagagatggactgttgattggaggtagtcttgtggcaaacactactgacaattcaaatataagattacagaaaagacgcaaaagagatataaaaaagaggctttttttaattcccaaattgatttttgtgtttttggtggtctttttgcttatcagtatatttttcagatcaggtaatagtgtaagcacttatactgctctgaatggtaaaattgaagaatatgtcctggctgacggttacattttccgtgaccaggagctcatatcatcaccgtcagacggttattttgagtgcctggcagatgagggagaaagggttaatgatggaagcacaattgccgccgtgtataaaagtgctgtagaccctgctgttactgaagaaatatcacagcttaaaacgaaaattgccgatttggaaaaggacgaggccgctgcggatatctattctgcgaacgctgtgaaaatagagcttaatatttctgaggaagctcagaaacttacgcaggttagggataataataatttctctgatattgtgagtataaaacacagcgttgatgattatattgcaaacaaacaatatgcggttgaaggcggcaaaacaaaagaggacaggctttcggaaatgaaagcaagacttgatgaattggaatcaagcatagacggggaacgcgagtatatatatgctccgagagccggaatattttcgtcaaagattgacggatatgaagacgttttaggcattgagatgatgggagacgccacgccgagatatataaacggcatttctaaaaataatgtgacggttggaaccacagtcacaaacggcgaaaacgtctgtaagataattgataattacgagtggtattttgtcggtttaatttccgaaaaggaagctgaaaattttaaggttgatcaatctatcagcataaaattctatgatttatccgatagtatggtatccggaaccgttaaggctatctctaagcctgaggacggcaaggtcgctataaccgtctattccacaagatatattgattcaatttatacgaccagcaaagtgtccgcagagctgctcactgagagttcggaagggataaaagttccgtcgtcttctttgagagttatagacggacagcagggagtttatgtcgttcgtttgggagtggccagatttgttccggtcgaacttctttacaataataaagaatgggctataataaaacctgttattagcacaagttatgaggaacatcttgaagtttatgatgagataatcattaatactaaaggtattgaggatggtaaggttgtgagacaatgagtgaagttcctgatatcagaaaaaattatatagacgttttgaactcggttaataaaattactgaggaatgcggcagaaagcagggcagcgttcgtctgattgctgtctctaagacaaagccggcggaatatataaaagaggctgtggaagccggagccgcagattttggtgagaacaagccccaggagcttgccgctaaatatgagcaggtgagcggagtgagatggcaccaaatagggcatcttcagaagaacaaggttcgccatataataggcaagaccgctttgatacattctttagacagtattgagcttgcaaaagaaattgataagcgcgctaaggctgttggaatagttcaggacgttttgattcaagtaaatatttcaggcgaggaaagcaaattcgggataaaacccgagaatttgccggagatgctggaaagtttaaaagagttcagcaatgtgaatacgacagggcttatgacaatatccgttaaaggctattctcaggatgaaaacagaaagttgttctcaaaactcaaagagttgggcagcaaatatggtcttagagagttttcaatgggtatgagccatgattataaagaagccatagagagcggggcaacaatggtaagagttggaacctcaatttttggcgaacgggattattccctaaaataatatgtgaaatatgaaatctattatatacaaaatactgataaacttaggaggaagaaaaagatgggaagctttatggataaagtgtacagcatgatgggtgttgacgttggagatacatatgaagaggaatactatgacgattatgcacagggcggatacgatgaaccggatccaaacgagagttatatgcccagcagaagaaattcaggaagaaacgcaggcagagtaaatagatacgaggacaaccctcagatgaaacttgttatcatgcagcctgtaagctttgaagaggcaagggatatagcaaaccatttaaaagagagaaagccgatagtaataaatcttgaagctgtagataatcctacatccagaagaatagttgactttttgagcggttctgtttatgctttggacggaagtattaaaaaagtatcaaacggtatttttctgattgctccatgcaacgtcggcgttatggatgaggaagaagcatacgaagaacgctggagctaaaagtggatacagatgataaactgatagtctctaaggcttttgataccgttagtatcgctgagagacagtatatttgcaaaactatggggtttttaaatccccatcaagcggctgtagtccgcagggaaatttcgagaaaaataccgtcggatattggcgttgaattttatggcggatataaagacgcggagagatgtttgtttatatgctttccggaatatttggaaccggactatgacagtattatctcagtgctggagataacagcccgtgacattgataaaatgtctcatcgtgactatcttggcagtcttatgggtcttggaattaagcgtgagaatattggtgatattcttcctcttgaagacaggtgttatatttttaccaagtctgatatatcaggatatataattgacaaccttttaaagataggccgccatggagtgaaaatttgcaaaagaagtctttctgagataacggtgcctgagaaaaagaccgagcaggtcagaaccactgtttccagtctaaggctggattgtatattatcaggagcgcttaatatgtcgagaggcagagctgcggaactaataagagcggagaaggttcaggtcaattttgaaactgcggacagtatatcaaaaatattaagtcctgacgacttagtttcggtcagaaattttggcaggtttaaagtggccgaaatagggggtctcacaagaaaagggagatatggtatcataattgagaagtttatttagtatatatagtagagtatagatttcgtgagaattgttaaacggtcaattgattaaagttagaagattgggaggatggaatatgcttacacctgctgatatcgaaaataaagagtttaaaaaagagatgcgcggttataacataaccgaggtaaatattttcctgaaagaagttgcaatgagctatgaaaagatatatcaggaaaatctttcggctatggataggataggtatgctgtcagacgctgtaaaacaatacaagtcgatggaggataccctcaaaaacgcattgtctgttgctaagggcgcaggggacgagataaagaacagcgctcatgggcaggcgcaaatgattattaaggacgcggaaaacaaagcggttaaaataatcaatgaggctgcaaaggaagtcgctgatataaattataagtatgaggaaatgaagagaagcgttgaggtgtttaaagcaaaagtagtgtctcttttaaattctcagcttgagattattaaggaatattcaaatataaatgccgacactgacagagaaataaggtcaagcgccgaagcggttgaagtgattaaaagcgaaataaacgatatccctgatttgccgggggatttaagtagagacgctgaatcaaatctgatgtctcagctcgaaaaagttactcaggaactccctaggataaaactgaatgaagacggcgaatatgttcctgcagatgagaattaataaataaaattttaatatttaaggttagggctgttctgcgtaatgcgggacagtccttgacatagaatgctgaaatttggtttgaaaggctgatgttatgataatatattttataataggtatactggttttaattcttgacatagttactaaacactgggcttcagcggttctgatgggaacatcggggataccggttatagacggattttttcatttgacttatgttgaaaattccggagtggcttttggaatgctccaggataaaagaataatttttgtcacaatgtcgctgttgatactttttgtattggctatgtatttttataaggcaaagaagagggatgtttggcttaaactgggaacggcgcttatctttgccggttctatcggcaatttgattgagcgtgtgacaaatgggttcgtagttgattttttggacttcagagtaataaattttccggtgtttaacattgctgatatggcggtgtgtatcggcgcggcggctttggtgatacactttttgacttctgatacagagagtaaagataaactaaatgagaagaaagaataaaatacggtgagaatatggagaacgatgagataaagttgttgaaggtatccgagggagaggagggaaggctcgataaatatctttccgataagcttgaggatatgactcgctcatatttgaaaaagcttatttctgatgataaagcggtattggtaaacggcaatccggcaaaaccgaactataagcttaaacccggggatataatagaactggcagtgccggaacctatagagttggaaattaaggctgaaaatattcctcttgatatagtatacgaagataatgatatgctggtagttaataagccgcagggtatggtagttcatccggcggccggaaactataccggaactcttgttaatgcgcttctttatcactgcggagattcactttcgggaataaatggtgaaaaacgtcctggaatagtgcataggattgataaagatacaagcggactgctgcttgttgccaaaaatgataacgcgcatcaaaaactgtcgtcacagataaaagagcacagtcttacaagagcgtataaagcgctggtgcatggaaatataaaacaggattccggtcgcatagacgcgcctatcggccggcatcccagcgatagaaaaaagatgactataacggacaaaaattcaagggaagcagtaactaatttcagggtgcttgaacgttacggccgctatacttttgtcgagtgtattttggaaactggcaggacgcatcagataagggttcatatgtctaagaacgggcatcctattgttggagataagacttatggggtaaaaaaggaagaatttaatttggcgggacagttgctccatgcgtataaggttgggtttatacacccggtatcaggagaatatatggagtttgtgtcagaattgccggattactatatgaacgtgcttgatagattgagaaattttatttaaaagctgtaaaaatttgtagacaaagtgagtttgttaggatataatagtagcaagggtgtctgggctcagagcgtagatggtcttgctattttgtctgtaaggtgggattaatatgagaacagtaattcttgaaaaagaagagattgacaaaaaacttaaaagaatggccagccaaattgttgaacgaaacgtaggtgaaaaaagcatctgtctgattggtatagtcaggcgaggtgttaacgttgccgaaagtttggcagaacacatcatagcaagcggtgaaatgaacgttgaagttggaagccttgatataactctatatggggcggaccataatcttatagccaaataccctgtattaaacgatacggatatacggttttctatagataataaaattgtagttttggtagatgatattttatataccggaaagacaattcatacggctattgacgctcttttggatattggctctccatcagaagttcagctagcctgctttgtggataggggaagaagaactttccctataagcgcggattatgttggagtgagagttccgagttcaggtcttgagcgtgtggttctgcatgttgaggaagtagacggcgaaagctgcgtaatgatagagaagcgtgatagttcagcagcgtttaaaatataaaagaataggcaaagatgaaatagagggttagtccctttatgtaatatacagcggaccaaaattccgcgtaaatctaatattataaatagaggaattacgatgattgataacttattaggtttaaaagaaacatcaagagatgatattacagcaatattggatgatgctgtgaaattaaaaaacgacgttttggagcaggacattaaaaagtcaaatatcctttctggaaagagtataataactctgttttttgaaaacagcaccagaacaagggtctcttttgagttagcttctaaatatcttggagctactgccgcaaatatttcagcgggaggaagcagtattgccaagggcgaaactttgatagatactgcaaaaactttggaggccatgggtactgatgtcataattataagacacagcatgtcaggttcacctcatcttatttccaagtacataggctctaaggttattaatgctggtgacggaatgaatgagcacccaacgcaggcactgcttgatattatgactatcagagagaagaagggaaaagttaaagggctcaaggttgctatagtcggagacgttaaacacagccgcgttgccaggagtaatatttacggtttgaataagctgggagccgaagttgttttagccggaccgtctactttgcttccttccaatttggaagatatgggcgttaaggtatacaccgatgttgaaaaagccgttgagggcgctgatgttgtaatgggtctgcgtatccagcttgaaaggcagaagaagggactgtttccatcaatcagagaatacaataagtattttggaatagatgagaggcggctctcattggcaaaacctgacgctatattgatgcatccgggccctgtgaaccgtggcgttgaactgaacccgcaggttgctgacggaagtcagagcgttattaatcagcaggtcaccaatggtgtttgtgttcgtatggctgttttaaatatgctggcaaacggtaaaagatatgataatttagtataaataatcttatattaggttgataaggcaaagtgttataattgtacaagtaaggggaaatgcagattgaaatcaaattggattttaataaaaaacggtcatgttgttgacccggcaaataatatagatgaaaagcttgatattttaatcaaggacggaataatttcggaagtaggcaaggatatacaaacaaatccttttgtgacagtgattgacgcagaaggtaagattgttgctccggggcttatagaccttcatgttcatttcagagaaccgggatatgagtataaagaggatattgaaagcggaagcgccgctgccgcaagaggcggagttacgactgttgtgtgtatgccgaatacgaacccaactattgataatccggctcttgttaaatatgtgaccgataggggaaaagaggtcggactgacgcatgttctgactaccggatgtataaccaaaggacagaaaagcgaagagcttgcggaaattggagagcttaaaaacgccggagctgttgctgtttcggatgacggcagacctgtgctttctccatcgcttatgagaaaagcgctggagtataccaaaatgtttgatattcctataatgtctcacagtgaagatttggatttggttgacggcggaagtatgaatgaaggatacatgtcaacttatttagggcttagaggaataccgaaatgcgctgaaagcgttgctatttccagagatgtgctgatagcggaggacgtgggaggaagactgcatgtctgccatgtgagcacccgcaattctatagacgctatacgccaggctaaaaaacgcggtgcaaatataacttgtgaaactgctccgcactatttttctttgactgataaagcggttgacggttttaatacaaatgctaagatgaatcctccgctgagagaacaggacgatgtcgacgcggtaatcgagggcttgattgacggcacaatagacgcgatcgcgactgaccatgcgccgcatgataaggatgaaaaggaaatagaattcgcattggcaatgaacggcattgtcggtcttgaaacttctttggggctgggtgttacaaaccttgtcaggactggaaaattgactatggctcagctgattgaaaagatgtcggtcaacccggcaaaaattataaatatcgacaagggctctttatctgttggaaaagcggctgatattgtggtttttgacgctgataatgaatatactgttgatataaatgaatttgcttcaaaaaataataattgtccttatgatggaatgaaactgtatggacgggttgattttaccatattggatggaaatgttgtgtttgaaagatagagaggagtttttaatatgatagactcattaatcgaaaagatacaggagaagaaaaatccgactgttgccggccttgacccaaaactggattatcttcctgaagaaatggtaaagaaagcgtttgatgaatatggagaaacttttaaaggagccgctgaggcaatttttgagtttaacaagacgctgattgacgctttatatgatatagttccggcagtgaaacctcaatcggcttattatgaaatgtatggtatagacggtattgagtgcttgaaaaaaactattaattacgctaaagaaaagggcttgtatgttatcttggacgcaaagcgcggagatattggcgcaaccagtgaagcatacgcaaaagcttatttgggaaaaaccgatataggcgaaaaacaggagcctgcttttgatgctgacagtttaacagttaacccatatttaggaacagacggcgttcagccgtttgtggaacagtgtttgaaatttggaaagagtatttttgcacttgtaaaaacgtccaataagtcttccggtgagattcaggacttaatcagcggcggcaagccgatatatgaacatatggctgagctcgttaaaggctggggtatggataatttcggaaagtatggttatacgcaggttggagctgttgttggagctacttatcctgaacaggcagaagttttgagaagggttatgcctcatacttatttcttggttccgggatacggagctcagggcggtaaggcggaagatgttgcaaagagctttaacggagacggacttggggcaatagtaaacgcttcacgttctataatgtgcgcatataagaaaaacggcggcgaggtcggtcaggcggcgagagatgaagctataagaatgcgtgatgatataatgtcagccgttggcgctgtttgattaactatagaggattggagaggttaagatgctgtgtgaacttgtagcaaaaggtcagataaggcgcggcctttttgactatattgtagactgtccggatatggcgatgaaggcaaagcccgggcagtttctccatgttttatgcggtggggatacatatttaagacgtcctataagtatctgtgatgtgattgaaaacagacttgtaagatttatatttgaagttcgtggaaagggcacaaaagaactggcaagagctaaagaaggagacagactggatattttaggtcctttgggaaatagttttgatatatctttttcagatgaaactgttgaaagcagttcgtctgttcccgagggagatatagttttaatcggaggaggaattggtatatttcctcttttatatctttcaaaaagtcttcccaaaaaacctaaaatattattgggattcagagatgcagaaagtatggcgctagtcagagagttttctaaaagctgtgaggatgtttttatagcaagcgacgatggcagcgtggggcataagggctttgtaactgacttgcttaaaaactctatagaatcgggaaataaaatagaaagaatatatacttgcggcccaaaacctatgatgaagattgtggcggaaaccgcagtcagcaatggaataaactgtcaggtatctatggaagagagaatgggctgcggagttggggcctgtgttacttgcacatgtactttaaaagatggttcgagaaaaagagtttgcaaagacggacctatatttaacgcatcggaggtggatttcgatggctgatttgagtgttaatatagcaggagtagagtggaaaaacccggttacaacagggtcgggcacttttggattcggaagagaatatgctgaatattttgacctttcgaatattggcgcgatttgtcttaaagctatatccaccaaaccccggctcggcaataagtcgccgagaatcgccgaagtaaccaaaggtatgctgaacagtgtggggcttcaaaatccaggagctgaatattttcttgaaaatgaactgccttggctaagacaatttgatacaaaactaatagctaatctgtgcggttcaactattgaagattatgtagaagtcgcagaaattttaggtaataagcttgatatgtttgaacttaatatttcatgtccgaacgttaaagagggcggaatggcctttggaactgacgcgaagatgatagaagaaattacatcaaaagttaaagctgtatcgaaagtgccgcttatagtaaaattgtcacctaatgttactgatattgccgagatggcaaaagctgccgaagcaggcggcgctgacgcaatttcattgattaatacattgctgggtatgaaaattgatataaataccaggagacctgtcctgaataataatatgggcggaatgtccggacctgcggttatgcctgttgcggtcagaatggtgtatcaggtgcgccgggctgtaaagcttccaataatcggtatgggcggaatcactacaggagaggacgctgtggaatttttgcttgcaggggctgacgcggtttcagtaggaacagccggtattgttgacccatatgcctggataaaagtgagaaatggaataaatgactatcttgataaaaacggatatgaatctgtaaatgatatagtaggaaagcttgaaatgaataattaataattggaggtttgacaaatgacaaatgaacaaataattgatatgcttaaagaggcggaagttttgctggaaggacattttcttttaacatcgggaaggcacagcgataaatatatgcagtgcgctaagattttccaatatgcaaagtatagcgaacctctctgtgccgagcttgcaaaacaatataaagaagataatgttgaattggttatagggccggcaataggcgcaattcaaatggcgtatgaagttggaaaacagcttggtgttaaaaacatatttgctgaacgtgaggatggaaaaatgacgctgagacgcggatttacaatcgaaaaaggtcagcgtgttctaatcgtagaggatgttgttacaaccggaggaagtgttcgagaggttatggagcttgtcaatgaagccggaggaaagatagtgggaataggttcaattgttgacagaaccggcggtaaaattgattttggagttccttataagagtgcattttctatggatataacatcttatgagcctgatgactgtccgatttgtaagtctggaacaccattggttaaaccgggcagcagaaagataaaataatgaaatcgaataatacacatgacggtcacagaatcagaatgcgtgaaaagcttgagagtggaaatttagctgatttacctgaacatgagcagcttgaaattcttttattttcagtgataccgagaggaaatacaaatgaaatagctcatgagcttctgaaaaaattcggttcaatttatggtgtattgtcagcagatatcagcagtttgctggaggttgacggcataggagcgcgcgttgcggattttctgcataatcttccggctgttttaggagttgttatgcgttctaaaatctcgtatgaaacagataataaatttttactgaatgatattaacactttaaaagattatttgttttctctattttcggatactgtttcagagcgggcgtatatattatttttaaataagggttttcggcttatcaagtttgagaagataagcgacggctctttagagcaggtatacatagatatatcaaaggctgtacggcgcgccatattaaacaatgccgcatatgtggtgctgacgcataatcatcccagcggctcggttatgccaagcgacgctgatatttcatcaacccgagagcttgacgaggccttgaacactgtaggaataggtcttttagaccatataataatcggcggtgacagctattatagtttccgtgaaagcagacattattaataaaagaatcctttaacccgatgaatttgtcgggttagaggattctttattttaaaatataaaaccaaatttcttataaaaaacggtgaaagtgcttgtataatatcatataatgtcgtataattactataaagatatgtgaatttaaagaacatattaaaaagaacatatttgttgggaggaattatagtatgcaagatatgcagaaaatatataaactaaaaatagataatatattttcaaatagtaatgatattatacatgaaatggattgccgatttataaaacagttggcatatggtaaaaaaatatgaattcaaaaagttcacatcatggtcatagagatagaatgcgggagaaattggagcatggaagtttggcagattttcctgaacatgagcagctggaagttctattattctctgtgataccaagaggaaatacaaatgaaatagctcatgaacttttaagaagatttggttctatatatggagttttatccgccaacaccaatagccttatccaggtggaaggggtaggtgaacgagttgcagactttttacataatttacctgctgttttgggtgtggtaatgcgttctaaggttctctatgaaacggataacaggtttgtgcttaaagatacggacagattaaaggaatatttgttttcattatatgcggacactatagctgaacgcgcttatatcttatttttgaataaaggatttcgattaataaaatatgaattgatatgtgagggttcaatagatgaggtttatttagatattaaaaaggcggttcgcagagctttaatgaaccatgcggcatatgtagtgcttacacataatcatccaagcggtcttgtttttccaagcgattcagatattatatctaccagagaactgagcgaagctttaaatacagttaaaattgggttttgggatcatgtaatagttggaggtaatcaatactacagttttagggagagcaggaattactaagagaaaatttgggaggaagacatgccaaaatcagcaaatcaaaagttaagattattatttgaaagagaaattttactaagagaaacggatgaggagaatcctattactacaaaacagcttatatcacgtttggaggattgcggcgttcaggctgaaagaaaaactatttatagtgatattgaggctctttccctatatggtatggatataattaaggttagcggaaaaaatggcggatattatgtaggtgagcgagactttgaacttcctgaattgaaactgctggttgacgctgtccaaacgtccaaatttataaccaaaaagaaatctgctgagcttataggaaaaattgaaagattaaccagcaagtatcaagctcaggtattgcatcgtcaggtatatgtatctgcccgtattaaaaatatgaacgagagtatatattataatgtcgacaaaatatatcagggtatagatgaaaacaaacagatagaatttttctatatggaatataatcttgataaaaagcgtgttcctagaagaaatggaaaacgatataaaataagtccttatgctttgacatggaacgatgataattattaccttataggctatgacggacagtccgatacaataaagcattatagagttgataaaatggagaatatagttgttctcaaagaaaatcgcgaaggagaaacaaatattgatataggagaatattctaaaaaggtattttcaatgtttggcggtagtgaggagtccgttactcttaattttgacaataggtttattggagttgtaattgacaggtttggtaccgatgttccggtaataaagactgacagtgaacattttgagaccagtgtaacggttaagataagtcctcagttttttggctggttggcgtcattagggagaggcgttaaaattatctcgcctatcagtgtgaaagatagatataaagagcatatacagtcgattttagaatgagaaagataatttaaacttttttaatagttttatattttatttggttgagataattggatagtaatcatattattaaactgtaattgataataaagttctattgaatttatataagaaatttatgtgaataaaaatataagtgctgcaaaatatataagttaaaacacagctgctatttattatataagcagctgtgttttaattggtatgcccgacgggattcgaacccgtgaccttcagagtcggagtctgacactctatccagctgagctacggacacataactttttttattataacataatttagctttatattcaataccttattctaacatttcataattcgttttgtaggtttgtcaatgatgtgttacaaaaaagattaaaagagttcgccgaaattgataaaagagttgatgtagtcaatgggagatttccaattaagcggacgcatcgggaatttattatagttacggttatgcacctttaattgctttgcaaaatcatcaaacgagtagaatttatgtgttgcataaaaatactcgttatccttacggtgtgaacgctagcttcaccgacaatgcaagcttcaggaacaaacttaacgtctatctgtactctctgaccgggatagagcatttgcttgtaaggctttggtatgtatttgggattgggtggtttaacaggcatttgtccctgtttgctgtgtatgcggtaaagacctgtaacagaacgagtatagcctctttgacgaagcttaacccaaaacacaacaagtccggcattggggctacggcggcgcatatcagtaatcaattttaactcatcagcggtatgctgattgggatgatggtggtggggtttatgtgatttatcggctaaggaggcgagcgtaccgtcgtagcgttttcgccagcgatagacatactgacgatttaccttatagcggattattgtgcgataataggactaaatcagaaagaccttgaaaaccaaggcattctggcttagtcccttctttttttgaccgaaaacaaaggactttcacaataatcaagcaagccggagggtgccgctgcacacttccggcagaaggaggatatagtgggtgctatcaaagtcttcttgaaggaagttgtgcttccaatcgcgcttgcgttctgcctcgcgtcatttctcaagccgatctatatgcctgacggcgtatgcgactacttcctaatgtggatctgcgtcggcttgccattcggcatccggaggatgtgcctctggctcgttccaagcggttacggcatctccggctcagtcggcattttcgcattgaacttaatcataggcggtctcatcggaggactcgccttcttcatcgggctgctgctcggtatcattcataccatccgagaaatcatctgaactacatcgtaaacgaagagggtttgtttcttctccaatttggagtaagaagcaaaccctctttttttgttgcccaaaagccggagtatttgctggcgatgcggcgaaagaaaggagtttttaagcatgaaacgcatgacagccggtgatcttcaagcactggaattgctgatgcagaccacacccggctttgagcattttgacagcggcgcggatggcattctccctgagtgccgaagctgccgctttcatcgccccttctggaaatatcagtcctgcgtgtttgcagagtgtccctactgctgcaatcccgtttctaccctcaaaaaccaaagtggcacatctgctgccggaaaggaagtcaatcatggataacaaaatcgaagtcttcaagaatgaacagtttggagaaatccgaacagccctgatcgaaaacgagccgtggtttgtggcggtagacgtatgcagggctttggagatcggcaattcgtcacaagccatttcacggctggatgcggacgagaagatgattaccctcatttcaaatgagggtaataaacgaggcaatcccaacatgacggtggtgaacgaacctggactttacacgcttattctgagcagccgtaagcccgaagccaaagccttcaaacgctggatcacacatgatgtcatccccatgatccgcaagaccggcggctacatgacggactcccttctggaacgtattcagaaggaaccagcggtcattgtggagtttgctcaggcgttgattctggaaaagaatcgcgtaaaggctcttgagtgtgagctgaacacggcaaagcccaaagccgattactacgacgccttcatcaatccggatgactgcaccaatatccgaacgacggcgaaggaactgaaaatcccggagcgcaagttcgtccagtttcttctcagggagaagtacctgttccgatctccctccggtcagcttcttccctacaacaaggacagcaatgccggactgtttatcgtccgcgattttgtgacgtactgctacaccggttctcagacctacttcacgccgaagggcaaggatgtcatccgaatgaagttccagaaaaagtgcggcgaagagctgctttccaagatggcaaggtgatttctgtggcagtctatcgcgtaaacaagaatcgtggctatacggtcatggcgaacttccaccttcgagacaagagcctgtcactcaaggcagtcggtcttctctcaaagatgctctcgtttaatgatggctggaagttctcaaccaagggactttctgcaatctgcaaggaaggtccggatgccattctctccgcgctccgtgagcttgaaaagcacggctaccttgtccggcaccggcagagagacggtaaaggcaggatgagcaacacaatctttgagatatacgaagagccgcaggagtctacaccagaacgggaaaagccacacacggaaaatccatgtgtggagaagccagatgtggataatccacgcggggataagtacgcacaaataaatactgatcaagtaattacccaagaaagaaatactctctcaaagaactatcaatccatcaatcttgatgggatggacaggatggatgagcgaagcgagtatgaagagattatcaaagagaatcttgattacgacattctctgtcaggatccgaagttcgataaagaccgcttccgggagatcatggacatcatgctggatgccgtctgctctaccgctccgaccatccgtatcaatggcgaggatatgccgcagcaagtggttaagtcccgctttctcaagctgaatagcagccacattgagtacgttctggaagcaatgaacaagaacccgtcagacatccgtaatatccgggcgtacctgttgaccgctctgtataacgcctctctgacgatagacaattactactccgccctcgtcaaccatgatttctacgggcaggacagatcagcagggtcaaagaagccgaagacctacgattatagcctttgtgaagacactctttaatgaataccatcgtgagcattgctcggaaaggaggacagtgtaaatgaaaatcatctatcgccggattgtgccgccttagcgtcggcagcagtccccataatcattccaaggaaaggaggtaaacgcagcaatgcaggatgaagtcaacaccaaagttgttgcaatcatgatcaagggcggtaaaatctccgctgaggtgctgaaaaaggctctggacaagttcgttcaggagatcgagaaggcgcagaagcagatgaagcagcctaaaacctatcgcggcaagcagtccatcaagcatctgatgagccagaatgccgccatctccaacatcgaagtgacggatggcaacatcaaatcctttgagcggaccgccagcaaatacggtctggactttgcgctcaagaaagacgtttccgttgagccgcccagctatcttgtcttcttcaagggacgggacgttgatgtgatgaccgccgccttcaaggagttctccgccaaaacggtcaagcagaaggaacagccgtccatccggcacaagctggatcaggagaaagcccagagcaaggcgcagcacaaggagaaggtcaaggtcaaaaccaaggatcggggtgtggagctgtgaacaaacccgatgtgaagaagctcattcttctgaaccttccgtatgtcttcgccttctacttcgcggataagatcgccgccgtgtttcgtctcgcccccggcgcagcgttcatcgacaagctgacaaacggctttgccgtgttcggctctgcctttgcaaatccgctgcccagctttcatcccgtcgatcttctcatcggtctgtcggctggcgtgctgctcaagctggcagtctacgtcaagggcaaaaaccgcaagaagttccggcagggcgaagaatacggatctgcccgctggggcaagccagaggacatcaagccgtacatggacccggagttctccaacaacgtcattctgacgcagacggagttcctgaccatgaacagccgtccaaagcagccaaaatacgcccgcaacaagaacatcctcgtcatcggcggttccggctcaggcaagacgcgctttttcgtcaaacctaacctgatgcagatgcacagcagctacgttgtgactgacccgaagggtacggtgctggtggagtgcggcaagatgcttgaaaagggcggctacgtcatcaagtcgctgaacaccatcaatttccggaaatccatgcactacaacccgttcagctacattcgcagcgagaaggacatcctcaagctggccaatacgatcatcgtcaacacgaagggagacggcgataagtccggcgaagatttctgggtcaaggcggaaaagctctactacacagctctcatcggctacatctggtatgaggcacccgatcacgagaaaaactttactaccctgctcgaaatgatcaatgcctcggaagccagagaggacgatgagaccttcaaaaatcccgtggatgtcatgttcgatgaactggaagcccgtgacccggatcacttcgcggtcaagcaataccgcaaatacaagctggcggcgggcaaaaccgccaagtcgattttgatttcctgcggtgcaaggcttgcgcccttcgacagtgcagcgacacgttgtcgcatataaactctgcgtgggattttcctgcaaagaggtaaaagtgacggaaaggctatagcctttctaactgatattccgagaagtggaatggcggggtaacgccctgaaacgcttcccttgatactgcgttggaagaaacgggacgtatttcccgcgactgacacagcacgctgaagtcggctgtctgcacccgcgactgtcccctttgggggataaagcaaagccgagccagaggtggccgggggtgttaggccggaggtctataaagtacctatgtccagaatgcggctgactaccgctgacaaaagcccgaatgtacaggtctataacgggatatggcagaaatgccatagccgtgaaaacggcgtatgtggggtaaagtaagatttgtcgatatgaaattccctatggtgttacaggcaccatcaggcatacaggcctaaagggcagggttaagggtattatgcaaagataggaatatcggaacgtggaaagccccggatgtggagtggatacgcatgatgaagcaatgggcgggaaaatcgtgccgccttttatgggaggtgcggtataaccgttcttaatccgggaggaaagagcagccatgctacctgtgaagccgtgaacaaagtaagcggtggagggacgggctgtagtcaggaacagaaacaaaatcatattcaataaacacgcataggttcgagtaggactaagaaaggcgaaaatccaaacgaaagtggggataagtaaccgactatggcaacaggaaaggcaaagaagaaagataagttaaggcacgccgagtattatgacttccaggcaattcaagataagctgtatgccgacagcaataaaggcaaagttttcaaacatctggttgaaatcattgcattacccgaaaacatacggctggcataccgcaacatcaagaagaaccacgggagtacgacgcccggcacagatggaaaaacaatcacagaattatcagcactctctgatgaacagcttatatgcgccatacagcgcaaattaaactggtatgtcccacaaagcgtccggcgggtagaaattccgaaaggaaatgacccaatgaagaagcgcccgctcggaataccgacgattatggacaggctgatacaacagtgcgtattgcaggtcatggagccgatatgtgaggcgaaattccacgaccacagttatggattccgccctaaccgaaaccaacagcacgcaatcgcccaggttcacaaaaatatgcagagaagcaatctccactatgtcgtagacatagatgttaaggggttctttgacaacgtgaaccacggaaaactgctgaaacagctctggacaatgggaatccaagacaagaagctgcttagtattatatcagctatgctaaaagcggaggtggccgggataggattcccggaggtgggtacgccgcagggaggtattatctctcccctgctatccaatgtagttctaaacgaattggattggtggcttgccagccaatgggaagaaataccaacggagttcccttacaaggaatcggtcaattacaacggaagcgtgagcaagagccataaatttgccgcactgcggaggacaaggctgaaagaagtcacctgcgtccgatacgctgatgattttaagatattcacgaacagctatcaaaatgcggtgaagttattccacgcaaccaaaagctggctccatgaaaggctttctcttgaaatcagtcctgaaaaatcgaaggtgattaacctgaaagagcagtattcagagtttcttggtttcaagttaaaggttatcccccgtgggaaacggagcaacggacgcgccaaatatgtagtagagagccatatcagagagaaatctattgcgaaaataaaaccaaacttaaaacggctgatttacgacattgagttcccgtcacaaggcaaacgtactgaatatcaggcgatttgccgctacaacgtttatgtaatgggaatccatgactactatcaattagccacaaaggtctgcgatgaccttacgccattcgccttatctgtccacaagagcctgcgggcaagactgaaagaacgggttaaaactgcaaaacaggtcagaaaaaggaagattccgtgtgaagttccgaaagttatcagggaacggtatgggaaaagcaaacagctccgatatgtagccggacacgcagttgtcccgattggctacatacggcacaagcccccaaagtccatgaaccgcaaaatcaattcctatatgcccgagggcagagccgaaatccataagaatctggacagaatcgacatgacggttcttcattacttaatgaggaacccggttctgtaccgtactatcgaatacaacgataacaggctttcactgtattcggcccaaatgggaaaatgcgccgtatctggcaaagtgctttctattggcgatattcattgccatcacaaagtgccacggtatttaggcggcaaggacaattatcaaaatctggtgttggtatgtgaagatgtacatcacctgattcatgctacaaaccctgatattatcagaaagtatatggaaatcctaggccttgaccaaaagcagaaagaaaaactcaataagttaagaagccttgtccacgttgagagttattgagatgaaataaattctgttcctgatggcaagccgggtgagctgaaaggttcatgcccggtttagggcgggggaaaatccggagataacatcaaaggattacctatcgctattttagaagcttttgaggagcacagcagctattcttctgcggtattcctcgaacaccttgtaaaagcctttaaattccctattgagtgcgttcagactgataacggacaagagtttaccaagaggcttggcagctcccaaaagccgaccctaactatgtttgaaaagcggcttaaagaacttggaatacaacataagctcataagaccgtacacacccagacataacggcaaggtagagcgttcacaccgtaaggataacgagtatttttatgcaacacataaattctactcgtttgatgattttgcaaagcaattaaaggtgcataaccgtaactacaataaattcccgatgcgtccgcttaattggaaagctcccattgactacatcaactcttttatcaatttcggtgaactcttttaatcttttttgtaacacatcattgacaaacctacattttgtcttaatttgttatatattatataaataaaaaccggacgcacttaattataaagtacgtccggttaattatacagaaacattaaactgcttcaaatccaatatcgtctattacatttttaaaaatgctttcttctgttttggcctcatcatattcaactgtcgccatttcgttttcaagactgacatcaacactttttacgccttctaaagctgaaagggctttttgtatagaagcaacgcaatggttgcagctcatgcctttaattttaatctctgaagttttcatattaacacctctatatttttattttatctttattcttttcaaaagtaatgaattagtcacaaccgaaacactgctgagagccatagctgcacctgcaattgccgggttgagaaatccaaaggctgcgaacggaattcctattccattatatataaaggcccaaaatagattttgtcttatctttttcatagtcattttagaaagataaattccgtcacaaactgcatttgggtctcctctcaataaagttatatctgcagcttcaatagcaacgtctgtcccatcgcccattgctatacctatatcagcactgactaatgcaggcgcatcattaattccatcgccaaccatggccacaacattgtcttttgacttaaaagacaatattttttctgatttttcatgaggcaatacgttagcaaacactttttttatacctaccgacttagcaattgctgcagcagtcgcatcattatcacctgtcagcatacaaacatcaatatccattctgctcaatctgttaactgcttgaacagatgtttccttaactgtgtcagaaagggctacggctccaataaaattcgtgttttcggatacaaacattacagtcttaccctgcatttcaaattcagacgctttttttaaatctatattgcttatctcaatattagctgaattcattagtttcctatttccgattctatatacatttccttccttattttttccctctatacccattcctacttttgcttcagtttcctcgagctccagcaaaccattaacatttttaacacaatgtgtataaatagccttaccaagcggatgctcacttccaaactccaatccgccgattattttcaaaaatgtttctttatcttcctgattagctaatattaagtcggtgacatcaggcgttcctttagttatagtaccagtcttgtcaaatacaactgtgtttatttttgaggatatttctaatatttcaccgctttttacaagtattccgtgattagcacagagccctgtaccaaccataattgctgttggggttgcaagcccaagagaacatggacatgcaataaccaaaactgatactgcgtttatcaaagaagtttcaaagtttttagtaataaaataccaagcaaaaagagttatcagagctattatcataatagccggaacaaaaacagctgaaaccttatccgctatcttttgtattggagctttcttgccctgggcatttctaacatatgtgattatatttgataacgttgtttccttaccaattttttcagcttctacttgtataacgcccattttattaattgtagcacaaaatacattgtctccaatttttttgtcaacaggaagactttcgcccgtaagcatagattcatctactgttgaccgtccgctttttataacaccatcaattggtattttttcgcccggattgataacaactacatctccggcattcaacatagagagcggtactgtagttataactccgtcacgaagaagatttgcattttgcggctgtagttttatcagcgactgtatagcttcgcttgttttaactcttgctcttaattccaaatattttcccagcaatattaaagtaataatagtcatggacgattcaaaataaagaccatccatctgtccatgtactatattacctgctatcacattatataaactgaaaaaatatgcagacagcgttccaatagaaacaagaacgtccatattagggctttttgattttatagcataaaacgctggtttataaaatctataacctattataaactgcactggtgtagctaaaattaattgaaaaatcggatcgtgaagaaacattatatgaattccaagccacgaggcaatcattcccaaaatcagaggggcggttaatattatagaaaatataagatatatttttagatttctaaactctctttgattggaattttcttttgattcgtcgtaaacctcagctccgaaacccatttttttaattttatctattatttcatcatttgttataagagtttggtcaaaacttacagttgccgtttcagttgttaaattaacattgatttcttcaataccgttcgtttttgctaaaacacgttctattcttccgctgcatgcagcacaggtcatcccgtcaatttttagctcagacctcataacaacagctcctttcaataattggaacatttgtaaaaagttagcaattcctaactcataataatcatagcatatttattttataatgtcaataaaaataaggatgagaattactcatccttattatataaatctaatagaataatatactacgcttcattattaaaactttgcagattttttatacaagcataaatttcagggtatttcttcaaaagatttagtggtttaaattgtctgtcagtgaaaccatgagtggtatatcctgtggctaataattcaccgtcatctctaataacgttatattcaaaaacgcattttgcaacgcccaatttttttaaattaacctcaatccaaacatcatcctgatacttagcacccttaataaacttacaatagcagtcaagcaaaggaagcaaaacgccgttttcttcaacttctctgtatgacatacctgaagttttaaagaattcagtgcggccgacttcaaaccaaggaaaatatctagagtgatgcactactcccatactgtcaacttcacagtatcgaaccgtaatttttgttttaaacaattttatctctccttatactatctttgctataccggagtaaacttgtcctcttattccgtctatagtaaccgtggtaccattttttagtatctttgtcgcatttttaacacctaccaagacaggaatatccaaagtcattccaacaatggcagcatgtgacgtgcttccggaaacttctgttataatcgctgaggctttttttaatatagaaattatagaattagatgtctcaggtattaccaatatatcgccgtcttcaaaatattttaaagcctcattgttattggaagcaacacaaacttttccgcttattgatttatttgaaagactttgtcctgacgctagtatatccccaaccaacagaacttttaaaatgttggtagttccgcttatacctaacggcgaacctccggtgagaacaactacatcaccttttttaaccagtttagtttctcttactgcacaattcacagcatgttcaaaaagctcatcgcttgtgctcttaacttctgtcataataggagtgacgccccatgataaattcagctgacgccatatttttttatttaaagcacctgcaataatagggcatttaggacgataagcagaaatctgacgcggagtatatccggactgagtgacagttatgattgcagctgcgccaatatcatgtgcagtcgtacatgacgagtggcttatcgcatttgaaacactggttgtttgatttaaatgcaaattttcaaacctcttaacataatctatattctcttctgttttaatacagattcttgccatagtttgaagggccaaaaccggatattcaccgacagccgtttcgcccgaaagcataacggcggaagttccgtcataaaccgcgtttgccacatcagaaatttcagcacgggttggtctcggattatgtgttatactttcaagcatctgtgtcgcggttataacctttttaccctctgtataacattgttttatcagctttttctgaatggcagggagttcgtcaaaggatatttcaactcccatatctcctcttgctaccattattccttcgctgacttttaatattgattcaatgttgtcaacaccctgcctgttttctatctttgaaatgatttgaatattttctccgccgttttgttccaatatcctttttatgtcaagaacatcaaaagctgaacggacaaatgatgctgctataaaatcaaaatcctgttcaattccaaatttaatatcttcaacatcttttttgctcatatattccattccaagctcaattcccggaacatttatacttttatgattgctgacaggaccgccgtttaaaacctcacatattacgtcagaacctttgatgccggtaaccttcatttcaattaatccatcgtcaatcaaaattttggcgcctgcatatacatcttttgccaaatccttatatgtgattgatgaacgagtgttatcgccaactatatttttaggagtaagagtaaagctctgtccttcaacgagttcaacttttccattttcaaaatctccggttctcacttcagggcctttagtgtcaagtaaaagggctattggaaggccgagttcatcacgcattttcttcactgcatttatacgaaccaaatgttcctcatgagtaccatgagaaaaatttatcctggcgcaattcatcccattcagcataagctgctttaaaacttctggctcatctgtggctggaccaagtgtacatattattttagtttttcttctcattgattatttctcctcacctatgtttattactcccatttttgtatataattttgatttacctctaatttttattgcagaagtattctctgtaaactgagcaatataaacctcacctttatctaatttttcagtatggtgaaaccgtgtatcttttcctctggttaaaccaataatagttactccgtcttcctctgcaacgattgtgacatattcaccaaaagtgtttacatccatatataaacctccagattttatattgctattaaaaataacatatatatttacttaaggcattatataccaaagcgataaaaaaatcaagcaaaattagtttaaatataaaatattaagcgcaaaattaaagagatttaattaattaaagtcaagatatgtatctggaacatcgccaactatgactgattctgcaatgggtacttctgtaactatgtcttcaaggtctcctcttacaggcaaaacaacacccagtgctgttgtaacttttacttttattaaatgttttgtttgattaattccagcggaaataaattcattacaaaactcaacctttacattctcatttgttaaaacacgcaacgatacaggtattccgtacccggaatagaacttactcgaaaacatagaaagtattggaattgatatatcgacgctgtttattttatcaattctattctgaacatttacagcaagttcagattttaaaaggtttatctccctgtaattggtttcaagactttttacatttccgctgctgtcttttgtcatatttattattgaatcatagttaatatttgattcatttattaattcgctgacagctgaattacattcttttgtaacttcactgtttaatactgataatgacaaatctttaattactggatcaatatggttttcaattgaattaaataaaaatacacatgaaactatgactaaaattaggataatataaaatttaatttttgaagatgattttctattatagtatgttctgtgacgtttacacctttttcctgataatccgagcctatactttaactttttttgccaaataaacataagaatcacctattgtatgttacgctatactctaatttttgttacaattataaatttatttataaataaggtaaatttaacgtgacaatgatggtttagtatagtataataaacaaaagattaaatttgtatattattttgatgaaagtgaggaatagttatgtggtatgacgaaagtgtattttatcaaatctatcctttgggattttgtgacgctccaacagaaaacgatggaatatataaaaatagaataaaaaaagttgtggattggataccgcacataaaaaaggttggatgtaatgcggtttatttttcgcctatttttgattctgataatcatggttatgacacaagagattataaaaatattgactgcagactcggcaataacaaagactttaagatggtagctcagaatttgcatgaaaacggcataaaagtggttttagacggtgtttttaaccacgtaggacgcggcttttgggcttttaaagacgttatagagaaaaagtgggattcacaatataaagattggttttatataaattttgacggtaacagtaattataatgacggattttggtatgaaggctgggaaggacattatgagctggttaaattaaatttgagaaaccaagaagttgtaaattatatactggaatgcgtagatttttgggtaaatgaattcgatatagacggacttagacttgatgtagcttattgtttggatcaagattttttaaaaactttaagatatcattgtaatcaaattaaagaagattttgttttaatcggagaattactgcatggggattacaatctattcgtttcagatgacaaacttcacagctgtacaaattatgaatgctacaagggactatattcgagctttaattctgagaatatgttcgaaataatccattcgctaattagacagtttggaccggaaaattggtcgctttataaagataaacatcttttaaattttgttgataatcatgatgttactagaattgctgatttgcttaatgtttcagaacatttaccccttatatatgggttattatttagtatgcccggagttccatgtatttactacggaagtgaatgggaagcaaaaggaaagaaagaaaatggagacaacgcactgcgtcaaagctttgaagctcctattgaaaatgaacttacaaagttaatttcaaaattatcaaaggcacatatggaatcaaaagcgctctgttatggaagttttgaatctgttctgctaacaaataaacaagcaatttttcagagaaaatttgaagatgaacgtgtgcttgtcgcaataaatattgatgattcatctttcaccgcacactttgacgctcaatgtggaatggctgtcgatttaattactgacgaagtacacgacttcggcggcggaagcgagcttcctccatacagcgtgcagtattggaaaatggaaagataatttatatttttataaattttaaatattatatgttttaaaaattcatatgtataaatttcaataaaaactgacatcagataaattatatgcactccaaaatgaactatattgattactaacaatgacagaatattattaaaaggagaaatttataactattataatattatagcatatatttttgattacaagattaaaattgataattaaatatgccaaacaggcttcttgtaacttttttaagaagcctgtttctacttgtttaaaaacatatattctatttccccactgaatcttcaggtatgtatccagctttaataattttttctacaaataaatttaagtctattccgccatttataattatattaattaaactcttaaatgacggtagtcttttcccattttctaaatctatgtattgacgcggggagagacagcatttttctgccattttctcttgatttaatttcagttccattcttctaaagtataatgtctttccaaagcataattttaatatattcatcatttcactcctaatatacaaaatgtgtaaattctatcaatttttattccaagctatatgtttaattgctgcatatgaactttacttgctcatactttttataaagtatgagtaataattgcataataaattttataattaaataaaaaaaacgcggctttaaatgccgcgcctgtcggtgcaaatatagttgttatcggttcaggtataatctccagcgttttttaatttttttataaactcaccggggtctatatcacaaataattaatatgtttataaaagttggggttgacggtatacttacagcgttttctaaatttacatatgatctgcatgtaatatggcacttatgagccatagcctcctgagtaagtttatattcctttcttttagatagtaagatttcgctcaatacagtttttataatctgttgattgtttttatttatcacaaaaaacacctcccttcaatatactacagatggattgtatcagaattttatatattttgaaacgaagtgtgattcatgaaatgcgaatcccaaaatcttcttaaattttttatatcaaaccttactcagtatatagtaaagatatattaataagttttaggatatttatctaacaataatatttttctttataatgtataagtttaaagattaattatattatcattatatataaacctattaattaatcttctaatttcttatttctaaataatactctgaagtattgatatgttggtcaaaaaaatttgcagttatcaggctatagtaacattttctttattgaaaatgtcatagcaaaaatataaaagggtatgttttcacacccttttaataatctaatatagagcacaattttttatatcaaaaattctgttgaatatatatacaccaaaaagatatatattatattaagtttatgatacatatgctgcagcagtaatatcgatgtattataagtaaaatatttgtttatttttatataaataaatacgcagttgtcaataatagaaatatttatacttattatctgtatgatgtattttataattataaagtaattatattataatttgcatttaggattactagattttgtggaaactcccgcatgagattccagtagccaattcctgataaattgtaacgttcggcaagctggagtttggcggtaatacttcttggatcttcaaaccaaacttcatgaagccgcccttcattatctgtgtatctgaaccacggtgattgcgcaacagtatcaaattgtatttctgcattatttgcttccgctatcctaatacattctaccggtgataaagacgttgcttttgttactccttgttcaaatggcaagggccagtcataaccataagtcggaacgcctaaaagtatttttgaagaagatatacgggtcagagcatactccaccacttcattaactttatttattggagccacagccattggcggtccatatgtatatccccactcataagtcataagtaacactttatccacagatgaggcaatagcgccataatcatgaccttcatataaagttccttgctgtgtgtcgctaacttttggagcaagcgctgaaaataaagggtatccaagaggatttatagctttgtacatattctggagaaatataacataatcatatctatcttccgggtatataaattcaaaatctatatcaagaccgtcatatccttttcgttccatgttaccaatagtctcattaattaatttactttgtatatttccatttgtgaatacaagatttgctctttcattgctgaagtttccagcttcagttaatgttgaaaggtgcattaaatttttggttccaaagctgtttgccatagcaatcatccactcatcgttttctaaattaaccaatccgccgtcttctcttatcccataagtaaatggagtagagtatgtcatataaggcagctgttctctaagaagttcgcgacttatgaacggataagcatatccgttggttataaatgatgttgttctgttttcatcttgatatttaattactattgtttgacccggtgaaatgtttgtactgccttttaagaaataattgtttcttaataaagttttaatgctgacattatatctgtttgctatacctgtcagagtatcgccctgctgaactatatattgtgtttcgggttgcagtataaccaatgcttgaccgataacagcccttgagttggtgtttaaaccattatcagctaaaaaattatttaaatttacattgtattcattagcgataccggttagtgtttctcctggtttgacgacatgaataatcatatttatacctccgtgatttatatttatttgtttacattaaaattaattgttaaactactaattaaaaatatgtcatgaatttctgcctattatgtttttaaaagtatatagcacatttcacataaacaatatattggtcataaaaatataacagatatttattttttaatatataattaataagtgtacacagattaaaccaacaaatggcagataattaacatgaatgtaaatcttactacgacatatcaattacaatatataaattgtgattaaaaaataataaatgtttctaataaatattattatgaatttatctgcacttatcttcaaaccattaattccattgacaaaattattttatcaaaaaatttttatataaaaaaattctaagttttataattcacgcatcagatggaaagactgcattagatttaaggttccgtatccccattgttcattgggataatccattgcaatgctttttacacatccgcgtatcaagtaagcccgtatttgataggtgcttaatgatacatcgtttccatttacaattccccattgcattaaaagtgcgcatgcaccactggttattgctgcagcagcacttgtgccgctcatttggccaaatccatacggaaagtacccgcctatattaacgccgggagctactaaatccggaagagttacctctgcccttgatggaccccaagaggatttttgataaaggctttggcttaaactattataagctccacagcatatagtgccaattgctgtccctggaatagttgtggtgtaatatggtgaagcagacaggaattctacatctggagacacaaatcctgacattggaagccatgagtgataaacaccattaagaataatgtcaccatgaacgataatggtccatattccgggagtagcatctaatattcgcacaactgttaactgaccgccgctgccttccagcggcatataatattctatagttactctggtattttcaagaacaagctttacctctgtgcttgtgcccgcttttgccggtacacgtccaactaattctccggatggtgaccgaattgatacagaaagcctatcggatacagtattccaaagcgaaatacatatgttaccggcgttgctgcctactcttacatcaacattctgagtttcaccaactgtgttgagttttcctgatgtatgatggcgctcctgacattcatttccggctgcattacaaatacaaactccttttaaattagatataccgcttaaatattcttcaaatatactgaaaccatcgtgacttccaaagtttgtacctagaccaagacaaattactaccggccttttcaattcatgagccttttttataatatattcaatacctaccattactgcacttgattcaaaagcgtattcctgttggtctggaacgcaaaacttttcaagataaaatggccgggctttttttaatttaacggcaattatatcagcctcaggcgctgctcctgaaaaatcatctatttctcttcctgcagctaccgaggccaaaaaggttccgtgacctgatttatcatgttcaggaactatatcatgaggattttcagaatataatgcggagttaatttgttcattattgtattcatgtccgaaaaagaaaccatcaggaggatctccttcagctgtttgatcatatataaattgaattttacttgttccgtcttcataaataaagctttcttgcatataatcaatacctgtgtctacgataccaactaaaacgcctcggccttttaagtcaagatacggttggttatgaaccggtataattccggctgaatcaagcggaggacggtccagtgttcccaatattacgggtgcagaacttataaatgatgtgcttaaatatgaaagcaaatcatcatagtgacttttatctatataaccgataatatatcttccggatagagtctgtgtaattgttatattaggatttttttttataaattcatcaagataatcggaacttctgactataaaatcaagagtgtcgggcgattgtataaaatttttgatctcatttgaaagttccatattaaattctccttttatatagttccaaatcatcgatggtgtcacaaagacttagttttccatatccccaaagaggattgggataggttaaatatgtatttcggactgcatttttgcataggaaagctttaacacgctgtccaaaaagaaaaggatcattcccttttacaattccccattccatcataagagctgctgctccggaaacaaatggggcagccatgctggttcccgtatatgtatcaaaaccaccgccggattttgctgtatagatgttttcggcaggagctgtcaaatccaattgaggcagtccaatttcatgtattgtgccgcctcttcctgaaaaggtgcaaacagtgtcagtttcgggtctataaccgccaacagaaattggagtaaccgcagtggccggtaatgtcatcgtcatgtctggagtagattcaagaaatgaagtacgttcagacacttcatcaattgtagggagccaaacgtcaaaattaccgtctactattttttcaccgtaacatattagagtccaaataccgtccattaggtctgatgatgcttctaaattaacgtaaatttcctgagctgcactatagtgatttggttcaccaaaagaaaaagatattttaacattgtgtaagtttaaactaatatctcgaaccaatggtgtaattatgcctgtagacatcccgctgggattaactaattcaaaattaacaatatcggaaaaatttttccaaagtgataagtaaacattatttttattagaggaaacgttaaagttcaaatttagtggattattttctttaatatttcctttaaaatggtggccgctatatccttcgtttccggaagcacatacaattactgttttccaaaatcttgatatgtcatcaatataagtttcaaataaagattgacctctatgagaaccattattcgtaccataacttaagttgattacgcagggcatattataattaattgctttatcaattatatattttatacctctcattatgtcggttgtgcgagtttctgaactaccaagctttactgctataattgatgcttccggagctgctccgctgattcctgcagcaataccggcaactgcagttccgtgtcctataaaatctttgcatacaaacttatctgcattaatatcagaaaatgtatattctgttcccttataaaaaccattaggtgggactccttcagttgtcatgtcccatacagataaaattcttgttgttcctgcagtgttcataaattcggagtggctgctatcaataccggaatctataattccaattataactctagaaccggtcaaatggtaacttgtttgattttggaccggagatatacatgttgagttgagaccgagtttagttgataaaaatagtttttttgttggttcccaatattcaatttcttttaattctctcagatatttgatttgagatggttctatatcaataattgcataaccggcgcttaatatttcaattttatctcttatagaatcaaggttgccattatattttataatatattccatatgaacacagccttaaaatatatttttgctcacgtaccaacgagctgtacatatattattatgagaaaggatgtgatattatgagaacagattatatagataaaggaattctgcaggtatcggtctctacagagaaatttgtaataccaacagataatgctttggttcgtattactgatcctcttgacggttctgtaatagaggaagttaaaacagacagttcaggtcagacgcccgctgttgaattgcctgcaccgccgcttgaatattcggttaacggtggagatgaaagaccatatgcattatataatgtaactgtttcagcagcagatacagaggttcttcatattgatggagtacaaattttacccactagttcagcgatacaaaatgcagttttaagaccagccgttccgggaggcttcaatgttcgcaatacgttgattaactctcattctctttggacgaattatccggcaaaaatacctgaaaatgaagtgaagccaatagataatgcaagtgggtttgtagtactgcctgaaccggttatacctgagtatattgttgttcatcttggtaatcccgatgacatatctgccggtgacgttgaggttccatttaaagagtacataaaaaatgtagcaagttgtgaaatttattctacctggaagactgaaacaataaaagcaaatatacttgcaattttatcatttactttaaaccgtgtttatacagaatggtacagaggaaagggacatgattttactgtcacaaactctacagcatatgatcaggcatttaattacggaagaaatatattcaaagaaatctctgtagcagtagatgaattattcacgaattatataaccagagaaaatattgaacagccattgtttacacagtattgcgacggcaaacatacgcagtgcggcggtttgtcacaatggggttctcaggcactcggggagcagggatatgatgctttaagtatattaaaaacttattatggttcagatatatatattgaatcagctgaaaaagttgaggggattccatcatcatatccaggagaacctctgcaaataggaagcttgggagaagcagtaagaaccgttcaaactcaattaaataaaatttcgaacaattacccgttaattgctaaactgaggatagatggaagttatggtgaatcaacagcgaacagtgtaaaaacatttcaaaaaattttttatcttccggaaacaggagttgtagatttttcaacatggtatcaaatttctaatatatacgtagctatttcaaaaatggcttcataaattaggttttaaaaaatagcattgtataaaatatttttgctgggtgacaaactaaaaatatcatggttgacattataaaatggttatagtagaatgtaagaaaaacttataggacatgatatatatggataaaaaattgttggaatatatctccgaaaaatcacaagagctaataaattcttcaacatgcagtaatggggcaaaatcagcagcagaatcctggctgaaagccgttggcacagaaaacgaagcttctgagacaaagaattattttgctgaattggaatctgatattatgcctattgatagtttaattaattttgcagaatcagataacggagtaaattattttggggctgacgccgcaaaaagcatagcaaaacatgcaagggaaattaaatcatcaggggcaaaatattgcgattgtccggcttgtgctgcagcagaggcaattctacaaaaaaagaatgatattcttaaataatagaacactgttgaccgattataataaaatactccgccgctcagtttatttgagcggcggaataaatatttattcagttgttattattgcagtgttagtaacttcgtcccaattcacattatatcataagttttcagataagaagctaaacggaaccattactctacacgattataactttattccatccatgcttctttataccatggggttttacgccatgcttctgaaaacacttgcggttcaggtttgtcaactactaccctctgcaaattttctacataagttactttggcgtcaaatgcttctgatacagccctaagaggtaccattgttctttctccaactattttcggggctgtatcaagcgtaaagacttctgtaccatttcccatttcatagttgtctatctgcattactactgttctttcgccatcgttcgccgttataaccccgtctccatcgtcataacttacttctgctccaagtgattcaaatattgcccgaaccggaaccagtagtctgtcgttctcctctatcggctgctggtctaagtttaactgtttaccctgtgaaaatacagctatgccttcttgaccatatccgtcgattttatatgggtcgttctctgttcctgatccagattttattatcatattatcttcattcagataaaatgccggacgaactccaagttcatacatgttaactattttcccactatatgtattttctccgtatattgatgttacatctgtgcttcctcctaacgttcctgcatgcatagttgcaacactacgaagccaatattcataatacccattattaatagttgagtttggaattgagctatcggttcttttggctcctacaattccaaagtttttccatatattatatatctgtgattcattgagtaaaaatacagtatcagtctctctatacattgcgccttgaaatgcttcacccagttccgaaacatcaaccgtatgaagcactctaggattacgcccactgcccaccataaatcctcgcatatatatcctattacatccgttttcagataaatcaagttcacttccgtttaaggtttgccattggctgactgttttcatcactctacgctctgataatgttaaattatcaatgtgcaaaaatcctttttcatccgcatatggatacttaccttcttcatattgaacagcattattatttccatgtatctttttagcggttggaggattgtttctcggccatattatatcccctccctcagcatatgaattcaaccatgtacgtatattactttctttccatttatttgttccatatactaaatgtccatctgcatttgcatctttaacagatgcgtcaaacgctttaaagcatattatcttatcgctcactattaacttgccattttcatcatctgccatatacctccataaaattggctcattattatactttcccatttgaagatatgtacctattgaaaaatcaattggttctgcgtttactgttattgtcataccagcatataaaactgttatagtcaaaataacagctaatattttttgaatttttaacatttgtttctcctccgtttctaattttaattatttcattgcattcctaagtactgcttaactctagtatccccgttttctccccatacattatataacaaccctctagttatatcatatattaatttaccataatcctttatattatatctattatcagcaaatgtactaataaattgatcatatgcaaattcgtcatgactatcactccaagttttactactatcgttataaacaccataaacagaaggatggttaataaaattatgaatattattattagttccatttaatgtttgagtcaaatatgcctgctcatttggaccacctgaatatataccgtacgacgtcatatcatcatagattaaactataatattttcccaatgttctcataaagttttgcgctttttgtttcgggtatacttttgcattgttgtcaaatccatgaacacggcctgtcacaagagatatatcatattccatttcaaacgaaattattgtgtttgtattctttattcctcctattacactatctccatctacgactgtgttgtttattgaactttttagtatattttcaaccttattttcatataacattttctcatctgccgccatatcatcattataatccgaaaaatacaatccaggttgaatcattactatatcaaatatatcgctgttatcagtgcattttcctgtattcgctatagttccgatgttctcccaatgttcagtatctacatcgcaataaggtatccatatcagttttttgtccttgccatgtatatatcttgatatctgctccatattcgcataacctgtatatgtgtttacgtttgattctaagcatataggatcttcacgcccgtaatataaacctgtaataatattttctccaaattcatttgctatactgttatagatattctgcgttgtatcaagatatagatttaaaaagtctgttctctgtgtggcatcatcaatttcgtatctccacatatgcggagttcccaaatatatttcaggcatttgtattttatctgctctgtttccatttactgcggttaatgcactctgcatattctgcaatatattcttatatttatttacaactatactcaaacgattgctcgtttctccgtacaaactgctgctatcccaaaattttgataggtttcctaaattattttgttctaccttaccattgttttgcatgtaaccgtcaaaatcaacatctctaactgatattacaaacgctacatttttgtttcctatcaactcaaaatacttttcaaaaaactcttgtgtatatacgtaattgctaccatcagaatttttatatctacttatattcgtatcagcatttacacttcctactccgtcagaatcataaagcataatatatacagtcttttcaccgtcctttacaactcttacatttttcaaaccttcatacagcgtaaataagcagctcattattgatttacacatctcggctcttgtgattgtatcttctggattaaagctatttccgtctcccaccattattttattgcagtataactgccttactgcctctaaataatactggtttattttccatttatcactcaatcccttattgctgttccaattactcatttggtcgcatgacatgttttcactatatgtatataacttgtttggtacttttgtatcttccactgctcccataaatactgactttattatatatgctgactcatctcttgggatttcactgtaaaaataactgtcgtcgattgctttccctgcatatatatcaatattttgcgtcatataccgtatatagtttctcgcccaatactctgcatttggatttgcattttctaattctacgtctgcgctttccagtaatattttaaataattccgctcttgtaaccgggtctattgcatttacttttccttggtcgtctcctcctattgctcctatatttgttgccttaaacaaataggggtagtaccatgtttctgttttttcttgcaaatcttcatacttctttaccttatatttttcatttgcattatatatatttggcactactccgtcaaactctgttctcactcctcttactatttctaaatcaggctccggcgttggtattacataccattcctgttattcaacaacatttgttttactccaacctgaatccaacttttgatatacttcaacatcattcttatcataaccatatggctttgtaaaccttatattatcatacagattttcgccttccgcaacatagtttactatatttgttttatttgctattgataacaaatacgaatatgtatcgataatattatatgttcctgatattgcagaactcgttccatttatacaataacttccctgactattttttgaggtgattatacttgctgtattatctttatacactactacagggaatctatactgcaggtttttatcaatgacttgctgaacatcatactttgataaatccgcattcttaatcgttatattactatcattcgtgtactgtcctaacatttcctgataatattcagctattgcgtttgattgcttcacttcatgagcatttccttgtgtcaagttatatacatcatccggttcagtgaataagttatagcttttagtatttcccttgattttactagcaatagccggcaaacatccataaatatttaagacagaagcaattgacgcaccaaattggttggcagtaacattagcaaaatcatgttttcctgctctgaagtcgctattatatatattaccgttcgaaaaagtgtatgtgatattatggtgatataactataacacaatttatgagttttccgtattctttttttctctttgtaacacatctattgtaatcctacattttactttaatttattctattttataatttgactttatctgccaatccgtatataatgttgagtaactctcagttaactatatatccgagattaaaccgattaacactcggtataatcaggactgaatcaataaaaacaaaaacagaaaggagatacccaccatgcacacacttaaaaaatttataaaatactatggtccatataaaaccgtgtttttcttagacctcatctgcgcaactgttatcagcgccgttgacctggcctttccgcaaatcctgcgcacattgactagaacattgttcacacgtgacaccgccactattgttaacgccctaattcctatagcgctggctctgctcacaatgtacataattcaaagcctttgcaaatactatgtcagctaccaaggccatatgatgggcgcaaatatggagcgtgatatgcgtcaacagctttttgaccattatgaaaaactttcattttcatattatgaccaaaacaactccggtcaaatgatgagcaaactcgtctctgacctttttgatattgccgagtttgcgcaccacggcccggaaaacctgtttatatcattaataaaaatagtaggttcttttacctttttgtttattataaactggaaacttgccattcctatggttgtgttggtttttctgatgtttcttttctctatgagccaaaataagcgaatgcaggcaacatttatggagaaccgccgtaaaataggcgacgtcaacgccagcctccaggataccttgtccggaatccgggttgttcaggcttttgccaacgaggaagttgaacgcaataaatttcaaaagagcaatcacgctttcttgatttccaaaaggaataactatagctgtatgggaaactttatgggctggaacctattttttcagggcatgatgtatcttgtcacacttgtattcggcggctatctaattgctcacggacaaatgcaggcaggagaccttgcaatgtatgcgttatatatcggaatatttatcagccctatacagatattggttgaactcaccgagatgatacagaaaggtctgtcgggattccgccgctttttgtcagttgttgaaaccgaacctgatataaaagacagccccggcgcgaaagtcctggaaaatgtgaatggtgatgtttcctttgaaaatgtgtcgtttcattacagcgatgatgacgcgcttgtattgtccaatctttcattcaaaatccccgccggacgttctatcgctcttgtcgggccgtcaggcagcggaaagaccactatctgctctctgcttccgagattctatgacgtaacggacggacgtattactattgacggtcacgatgtacgcggtctaactctaaaaagtctcagaagccaaataggcattgtgcagcaggatgtttatctgttttgcggaaccatccgggaaaacatctcctacggaaaacctgacgcaactgcagacgaaataatagaagccgcgaaaaaagctaatatacatgattttatagaagaacttccggacggctatgacacatttatcggtgaacgcggaaccagactttccggcggtcagaaacagcgtatatcaatagcgagagtatttttgaaaaatcctcccattctgatattagatgaagccaccagcgcccttgacaatgaaagcgaacgatatatccaagaaagtctcgaagaactcgccaaagaccgtacaactatcacaattgcccacaggctgtctacaatacggaacgctgatgaaatatatgttattgctgaaaaccggattgcagaacgaggcacatttaaggaactaatggatcaaaacggaatttatgctcactactatgaaatgcagtttcagtaatacaaccggagggttccgctattcaatacatacttacaaagcatatataaaattacacgttgcaacgagtatttctaatattggaaacaaaaaaattgtcataaataattgggggataaaactaaaggatagttttatattaatattgactgaaggatttggaaaagaactgtttgacaaattagtttctgtaaaaaaaccttatgtttcggagccggaagaaaatgtagtatttttctatgataaaaaattatttatacggttattaaatgataacatcaataacaaaactattgaccataatagtaaaataatgtttgtgattcatgattccacaggaaggtcttataccatcagaagtaaatataatgcaggtaaatacatacataataattataatttaactgtgaaattataatacctttaaacctctacaggtaaaattcaatacttttatttgaaaaaagctgtcccagtaattagatataataacttaaaatcctaataaaccaataaataaagttctatttataacttatagcattttttacctttcggattaactactaaaaagtgatatcatttagaatttaaaaaaacttataaaatataactacttgaaaattttatattaattttataactttaaatttttcctgatagaaaatcactgagtttcttaatcaaaccaataaaaacaagtaataatcttaaaaactattatggtaaagtaagccatagtagttttttattttgagaaaaaatatataatagtaagaatttttccaaagttaagtgtatatcaaattaaatcattttataaagatattacagttattttaatctctaaaacaaccgcataaaccgaaactgcatatattgttccagtataattgtatactaattaaacaagagcaaaaaaatttattttgtttcaaacataataataaacacaaaaaacttaaaatacagaaaattttatcgtcaagtttagacatcataataatatgtatttctgttgttaacgtaataattctttaacttaattcacagttcaataaaacgcagtcaaaataaatcggtaaaatttctaagacatttcattgaataaatcttcctgacaaatacaaaataaactttattaataagtttatttgcgtaaatttatgtaaccgataggtctaatgaatacatatggttacttctacaaacaaattcggcaaaataaaaactgacaccgttttttaaacgatatcagtagtatgtctgcttaaaacgtaatatttactgccgtatatatttttataataataatacaattaataaagttcatatttattaaggttcaattatctcggcactaatttttgtatcattctattttatgtagcaaccaaaagttctaaatcacggcctacagctatatctgcctttgatattccaaattttacagtttcatacgctagcttaggataattattttcttcacttaaatggcccaaaattattttttcggctcccattcttacaagaaactcagttgccttagccgcgtcatcattcgatagatgacccagcttacctaaaattctttgcttcagaggatatggataaggtcccacctcaagcatccctatatcatggttggattctaacaaaaccgttttacagccgccaatctcacgaaacacctcttcagtcagaaaccccatatcggtagccaccgccgcccggcaccttccgtcatcaaaacaataaccaaccgggtatgctgcgtcatgaggaatcggaaacggctttataccgatatctccaatagaaaatggctcaactccctcaaaaatctttattttatcatcattaagctttcctaaatcattagtcatgattgcggaccaagtcattgagttcgcatataccgggacgttataccgtctcatcataacgcctattcccttaatatggtcagcatgctcatgtgtgacaactatcccgtcaagatccccgggctcaaagccaatatcagccatagcggtttttacagcttttccgcttataccgcagtcaactaatattttggttttgtctgtatatacaagactggcattgcctttactcccgctttttaaagaatgtattttcataaaatcaccatatttagtcttctaaataaaaaggattggcgcggcgcaccgcaatcaatccccaatatctatcacaatttatacgtttacagcactcaaaactccgggcataggattaacatttcggcgtgttatctgcgccccaagcgctctcagcttttcttccaggttttcataacccctgtcaatatactgaaggttataaatctcagtaactccgtctgctatcaatgcggctattaccatagctgcgccggctctcaggtccgttgcgcacacaggcgcgcctgtcaaacggcttccgccctcaacaacggcaacatccttgccttcaacattcacattagcgcccattctattaagttcatcaatatatttaaagcgattatcccaaacgttttctttcattatgcttgttccttttgccacagtcagcaaggtaagcatctgaggctgcaagtcggtaggaaacccgggatatggctgtgtttttacattagcgcgctttagttccggcttgtctacataaatccttatcgcctcgtcatactcctctacgcccacgcccatttcttccagcttagcactgagagattccatatgcttaggaataatattggtaaccataacatccccgcgggttgcggcagcggcaatcataaaagttccggcctcaatctggtcaggtataacgctgaatgttccgccgtgaagttctttaacgcctctgattttaataacatcagttcctgcgcctttaatattcgcccccatagagttcaaaaagttagctacatcaaccacatgaggctctttagcggcactgtctataacagtaattccgtcagcaagtgcggctgccagcattatattgattgtggcgcctacagatacgacgtcaagatagactgtatcgccaacaagctcgtctgctgtaatattaaccatcccatactctatatcaacttttgctccaagcgcttcaaaccccttaatatgctggtcaatcgggcgaactccaaaatcacagcctcctggcaaagctacgctagcctttttaagcctgcccagcagagcacccataaggtacgacgacgcacgtatctttcttacgctgtcatatgacgcaacataatccgtcaaatcagaacagtcaacctcaaccgtatcctctccgacaaattcagccacaccgcccaatccgtttattatgtcaatcaaatcaagaatatcacttacatggggaacgttttctataacacactttccctttactaatatagacgcgacaagaatggcaacagcagagtttttagcaccgcttatcttaacttcgccatgcagtttaacaccgcctaaaattaccattttctcttcattattcattataaaatgcccccaaataaatagcattaattatgtaaaccgaagctgcaaatattcacgtttctatttataaaaaatttataaaccaacaaatattataacacaaataaattttttggcaagagcatatctatgtttttaaaagaatttgacaaaaagccctgtcaaacactataagatttatatcttttgcatagataaatccctcaatcgcattgatagcgctatatcttgtatctgtaaacagacactgatacaagacgcacaaaaaacgccggctctataccatcgtcacatatattgtaacacaaaaatattacgtattgattacgcttgctttaaaaatcaaataaacactaaaaatttgcagatgacacggtttgatatattttttcatgtttcaccaaattcatacatattaatataatgaagtgagagatattgttccggcacaatttctgatttatatttaggaggaattcatatggcaacaaaaatatttgtagacgccggacatggaggaacaaatcccggcgccgttggcaacggagtgattgaagcaaatgtcaatcttgctgttgcaaccgctttagctaacaatcttagaaacatgggatatgatgttagagaatacagaaccacaaatgatgaaaatgttataacacccatagctgctgatttaagaaaacgtgcacaaacagctaatgattggggcgctgattattttatcagcattcacaccaatagctcgctggatccggcagtaaacggctttgaaacctatgtatacaggcttggcactcgttccgcccagcttgcgcaatcgatacaagactcagttgttcagcggttaggagtaaaagataatggcgtaaggcaagccaacttctcagttctgcgaaacacaagaatgccggctgtgctggtagaactcggatacctttcaaatccgactgaagcactgaatcttaacagccctctctggcaaaataaaatggcttccgccattgccgacggaataaataattatataaaacgatagacataaaatctaaagctaaaagccgttccaaataatttggaacggctttaataatcagcactttattttctaaagtattttattcagctttttgctgtcctataaaattcgctaatctttggaataccaatgacgcctcggctctgttagctgccgtttgcggattgaagttattgttatcgtctccgctcattataccgattatcttattatatgttactgcttcgaatgcgtaatcggaaatactgcttacatcattgtaatctaagttaatcatccatgatcctacaggacccataccctttgaaacaacataacggtaaatcattgccgccatttgttcacgagttataatttggtcgggagcaaactctgtgtctgtataaccatttactactccgttcgcagacgcccagccaatagcttctctatagtaagatccttccggaacatctgtaaatccaaagtttgtcatatcagtcttaggctgattttccattctgtggagcactgttacaaacattcctctagttatgttttcatacggaccgaatgtatctgtttcgataccattcatcaaaccgttttcatttacatacttaactccgtcatagaaccaatcagatgtgttaacatcattaaatgggttagtccatgaagacgggttctttgtcggctccggtgaagctgaaacattaggatttgcagtctcagccggcttaggtgttgaagttcctccggtactgtgtccgctgtttccactatttccgctgtttttataaccggttttatcgaatgtatatgaaacagtcatagtttttccgtccggactaatctcattaacttctgcttcattaccgttaactaatgcttttgcattgtcagcaaaactatatccgtcttttgccgccaatgttactgttgctgtatatactgtaccataatcaaactttccgccttgttctacattaggactccaagtaataatacctgaataatagtatgaaccttcttctacagcagctgcaaacgttgccgcagcatttgatttcggcgccgtaattttaatctcagcactgttcataacgaatgttacattttgatcagcatatttgttgccataaatcactcttacataggtatcgccgacataagcgtccgcacttggaagagaaacatctaatcctggcttaaatgtaaacccgctctttgtagattcatcataagctacatcttgtgatgttccgtctttataatgaaccgtaataactaaacctgccggattgaatgttgaaccttctgtatatgaaaccgtatcaggagcatttttaatttcaatataatcaatgctgctttcctcagtagccacaactacagcttctgttttatcatcattaacctttaatgaattatcactttgagctacgtcaacttctttaccgcttacggctttagccacgatttcataattaccctttggagctgaacccacaaatgtaatttcacctgcttctgaaacttccatatccaatacaattgtttcaccggtagccttatttaccaataaaacttcagaaatctcttctgacgcacttatctgaacctgatactcaggcataggtgttgcagttggtgcgtttggttttactgtcgctgttggatacggggtcggtactacaacaggtgctgatgttggttttgctgtcgctgttgcctcaggtgtcgctgacggctctgttgttgccgttgcctcaggtgttgctgatggctctgttgttgctgttgcctcaggtgtcgctgatggctctgttgttgctgttgcctcaggtgtcgctgatggctctgttgttgctgttgcttccggtgtcgctgatacttccggtgttgctgatacttccggtgtcgctgatacttccggtgtcgctgatacttccggtgttgctgacacttccggtgttgctgacacttccggtgtcgctgacggttctgttgttgctgttgcctcaggtgttgctgacggctctgttgttgctgttgcctcaggtgttgctgacggctctgttgttgccgttgcctcaggtgttgccgacggttctgttgttgctgttgcctcaggtgttgctgacggctctgttgttgccgttgcttcaggtgttgctgacggctctgttgttgctgttgcctcaggtgttgctgacggctctgttgttgctgttgcctcaggtgttgctgaaggctctgttgttgccgttgcctcaggtgttgctgacggctctgttgttgccgttgcctcaggtgtcgctgatggctctgttgttgccgttgcttcgggtgttgctgacggctctgttgttgctgttgcttcaggagactgagtcggcaaaacatcatttgtaattgatactgttggtagtttttcagcgtcagttacgaaatcagttccattccatacaacaatctgctgcactccgtctccgtcttctgccacctttttattactctcgtcgccataatataagtttttaaagttcagcacatatcctgtaacatcctgttcaggattaccatttttatacacggtctgtaaagttgcatatccttcccatccttctgttgggtcagttgccttataccactcattttctatgttaaaaattgcatttactttatcaaccaaaccgttgctaagccttaaagcgctagctgatatttcgtatatattatcctttatagtaatcgtagcattctcttcaacattatatatactgattccattatgagttatctttccaaaatgattcccggatatttctgttccatccgctactttaacaccatttttatttacttcactgcctacatcaaactctacagcattatagtaaacaccatcattttcagttccaaatgtgttgttctttactatagtctttccataatttttaagattcaatggtgtttttactccagcggcagttgcttcaaatttacaatcagtaattgtaaatgctccgtttccgctcactgtaagcgctccaccgtctccgaaattaaaccctgatactgttatatcattagcaaggactgcgttctctgcagttgttattacaactgagcctgaagcaggagttattgtctcgtttacctttgcatcttctatagctgctttaagggatgtataatatacatcttttccatttctgtttatcttagcaacattgtctaccgcagtttctccaacatgataagttgttccgttaacaacaatttccttagcttcagttcctaaaactgctgccaaagcctttgttgtttccacaaccaaagcgtcgtcatattttacgccgccgatagtttgtgctaaaggaagatactcaattccgttgtaagtaatataattgccgtctccaaaatattgagcttcattattcgggtcaaacttttcaaaagtatcattaaccgaagaagtattatcaaaaacaacagctgtagcagttgaagaaatagtaacaccaactatagcgttataataataaagcgctttaaatgtattattatttgacgcacagtctgtaaatgtaagacctccattagaaccattttttagtcctaaaaaggctgcgacctttgtgcatccggaaataacagagttctgaacaattacattattaaatttgctgtctcctctggcttcgccgatcacaacggcagcgccgctgctgtaatcctgaacaacagtatttcctttatcttctacattacaattatcaaacactatattgcttatttcaacatcaccattcatgtgtccaataaaccctgtgtaataattataatttgccgcatttgatgccggggcaactgtgtcaataatattaagaccggttattgttgaagattctgaaccctttatcacaaaagttccgctccaagcagtacaatttgagccgccggtatgaggacctgctcctgaacacgcggaaatgggaacccaataatgagctgacatatcatatgtagagcctgttaagtttatagttttcccgccaaagcttacattttgattatttatcaaataagcaagacctgcaagatcggcagaatcagttaaatcatatgatccgctattttcgtttcctgtataccagcttatatcataattatctacgtcagtccaatatccatttgatgtaacatttgaagactgaacgttgttataatcatatgacttctcctcgtctgcaaaaacaggcaaagatacaaacatagaagccatcatagcgactgttataatccaagccaaagtagaacgaactgctctcttttttactttcattaatttacacatccctctaaaaaatttatattattttattttttgcaattattatttaaaactatagaataaaaatatttctatagtttccgcttctttttacgaaacgcttttcttgttcgcgctgcgcaaaactgtgtattaatccatattttgcacactgaattcgaattattcaaaacattagaatttttaaaccaaaaagcgtgtataatagggtaagaaaaaagcggccaaataccgcccagatactcgcgtaggaggcagctgactgacatattgaaacttccataaaagcatattgcttataatggtcaacttagtctctaaagctttgcgacctattttttcaaatagtttgccaatatttaattcttttgttaatatccaaagtaacagtatctcttggatttgtgtatacattatacaacgaaacgtcgaaaaagtcaatattctatctctagaataatatataaaaaaaatactagtgatttagtaaatttacacaatacacctgttcataaattggcacaaagttccaatcgttttgtggttttttatgcaaattttattccattaattattatttgattacatttgttacaaaacatttaatgatatacggctaatacacccatgtcttaaaaactcaataaaataatcatcttgattattaatattaaataatatataattaaaatatatttactttggctttctgtgaggtgttaaggatgatgaaaaagaataaaaacagagttttaagcgtagttttcaggagcgcagtaattatcttatgcgctctctccataatgtatgcttttattcttacttcgtgcacacagccagcccgctcctcaaacagcgacagtaaagctttgactgttaaagataattctataataaggattgcttttaccgccggatatgaaccatttgaatatatagacgattcagggaattatttaggatttgatatggcactaggatacaaactttcagaatcaatgaacagaataccggtttttcagaatatgaaatcaaattctctgcttgattctcttaactgcggaatatctgatatggtaatttcagctgttgaagtaactgatgaaagacaccaaaaagtcgatttttctgattcttatattactctcagttcatcaattataacgtataaagacaatactgatgtgaccaacataaacagtcttaaaaatgcacaaaatgtggctgttgcttccggcagcgattcaggttattatttaactaataatcttggtctggcaaatattaaagaatataggaacgaggccgaggcagaactggcagttttaaacggcgccgccgatgtattatttactgacagcaaaattgccgagacttttgtaaatcaaaatagaaagtttactataaaagagacaaatattaatcagcgtaaattttgtatagcggtttcaaaaggaaattctgatttgctgagactgataaatgagaaacttaacgaatttaaaaaagatgacactctatacaacctgagatcagcctatattagcggaaacgcagaacttagaacaacatttgacgatgaacttataaatattcagcaagacaggacagttcctaataccaaaacttcaactgattatgcagagtaaaattccaaaaatttaaaataaaacaaagagacaggggtaaaacagaattaattaaaaatagatggaaaaaaccttctatgacagaatgcaatgaaactgtcataggaggtttttgtatgcagaaaattacaaacatattgaatattgccaaaatttattattttctaatatcaagtaaaagtcgggcgcaagataaataacaacttttactaagttaaattttatgatcttttatttaaatgatataaaattacttttatttcacaaaaacgcctaattgcgttttatatcttatttatatcagcttatctgcgccgcctaaattatacacattttcaaatcccatagctcttgccttttctacagccaattctgctttaaacccatttaggcaataaaatataattatcgtatttcttccatacgtcaacaaactctctatactgtctaatggaatattaaccgctccttggatatgggattccttatattcatactcttcacgaacgtccgccaaaactgctccgtttgaccgcagcaccattgcctcgtccggttcaactctatcagatcccagcgataccatttttattgtcttactttctgtatcgccggttatattcattactccgccgtctatttttatatctttaatatcaaaaccgcaaacttttttcaactgataacatttttgacacaacggcaatattaacattattccattgtcgcagccggcatataagcggcctttatactcatcaatactatttattttcagcgggttttgaatttcttcaacatcacttttcgcaaaataatccagctttacttccgaccaaacggaacctgagccgcttgaagacaatttggtttttcccgtgacgctttctttttccaattttgcaaaaccgtttccccactttgcactctgaattgtctcaaaagttttactttcatcaattccgtttatatattctacaaaaacagcataaatatttttatttccgccgttgccatatacgtatacaggctgagttatatccgatatttttgccgttacatcagatttacattcaggatatgattttccgccagccaatattgttcctccttggacaatataaatttccctgtctcttcccccattgccgtcaaacagaaccgtaatatagcattcagcttttggtctgtataacaagcagctttcggtttcgcttccgtcgcctatctgccaggcagttgaaaagacgtattctttgtcgccatatacatatttaaacttctttttttctcttcttaaaactgtgccatatcctgtaatgcaatcaatctcaggaagtttatccattcgtgtattgcagaacaataccgtatacgccctgttatcaccgctgtatacctttactttcctttctgccggttttctgtaagtatggttaaatatatcagacgcttctgtatccatattgtatacgcaaaaactcacagaatccccgtatttacaatttgtggagatatcatacctgccccctgctgtcacctcaatagatttaatttcctttgagacttcctcaccggtatacacttttaaaacgcccgaagtgaaaccgctgcccaaacactttatatcaaccgacatcaaaccgttctcccggtcatgaacatcagcaatactatatggaagacctccgtcatattcctcataatccagcttaaaaaagtctatattggcagaattagcttggagaaatatcgatgaaagtccgttcccatctacagaggcattatacaacactgaactgttaactttaaatacagcttccttccaaatctcacttccgcctgtttcttttaaaatattctctgctaaaatacagttgggagccgcacttctattaacgctgaattttatattgacgcttccggatttaagcgcatacctcacagtaattttccttagattttgaagccttattcccttatactccagccagttcacgcttgtattgccggtactgttggccctttgagctgagccgctggctccgcttctgttgtcgccgaaattattttcttcactgtcactgtcctcagcctcaatctgagtattaatatatataagcgtttctccgccgactaaacttgatatatctataacccgcactctcacaagacctccggtcattaccgtgagttctcctgtatttctgttgatttctgcagaatcacgctttgaactgtccagtttttctatctgccaaattaaatttttgctatcaattctattatcgccgtcataagcctcaagttcaataccatgataaggattttcagtatttactgtacccgaaactccgtctttgcttgttatatatgggggtattccgcccatgcggtaatctattactccatcaaccaaataattgggatttttagaagctatcgtataccgattttcaatattattcatttccaccgaacgcagtttcttaatcgattcagccaatatcttggtcatatccgtatacttgaccgctgattctatctctttgacagcggaatcatatatcgcttctaacttattccaattattatccgaaaacgctcctttaggataaaaattcttttcgtatgtcaattcttgtaccgctttatttttatcactagttccggccttatattcaagtatatttactattgggaacccaaccgatttggtctcattattcacagtaacttcggccgttatcattgtgactcctgaaaccggaccggatttaacaacgcctctatcatccactgcagcgaccgtctcattaccacttttataagaaactttcacctttgatatatccaaaattttctcgtctgtcataacaacagacagattagctgttacagagcttatttgctcaagttctccgccttgtccgtttattaatccgcgcaccgctataccgctgggcagaacagatacggttttcaacttgctttcaagctctccggaaacactgaactcgtctgctaaagattcatcagcagaatttctgccaatatacaccttatattttccctctaagacataggctttttgttccttctcactgaaaaacgacatttcagaaatatcaagctcaaacgaaacactcttaatctctccgggcagcagttctattctttcaaatccctttaattgttttttaggcttattctctccgtcagcccccggaacagaaacgtaaagctgaactatttcagccccgtatactgtaccaacattctctatatcggccgaaatttttattttttcattagcacttatatatctttcagataattttatgtttgaatatctaaaatccgtgtaactcaaaccgaacccaaacggataaaccggcgtaccgctgtaatattgatatgtacgccccggaaatcccgaacggctttgtatgttataatcattaaaatatcttgttataccgtcttctccctttaccccttctgtttcaatcggcataagttccaaatcttcagatttataccaagtggcagtaagcttacctgacggattaacctgccctgataatatttttcctagagcggttccctgagtttgaccgttgtatgaagtccagattattgcacgggcgtccttttcaaacggttcaacatttacttgcccgactgtttgcattgcgactatagttttttccggatacgctgatgttaaagcctgaacatgcgactggctcaaaggcaagtctatgctttttcggtcatacgattctgccgaatctgaaagattagtccctgcataagcgattataacatccgccgagtccagcttctccttatatttggttaccgagaattcctcctggtttgcctcaaaagataaatataaatcttccgttccgcaataccctccggacgttccggtatattcgcctatacagtctttaaacgaatttaagctgttagttttaacgctgacaacttcggccacctgcggtcctccatcgccataacataattttacctttcctcccgctaagtccccggttgatacctccgccttaacttttaaaacatcactgaaatctatatttttaaatacggcggtaccctttctagtaatatcttcaatcaaacttccattaagcgtaataccgcctgaaaccagggcagcagataaatctatctttcgttcttcgccgcttttaagtataaacgacaaccctcttatattcattaatttggtttcgtctgtagctccgccaagataatctacattaacatcaggcattaccctccttaattctgttacaataccattataaggagtgactgtttgttccggagaccctgaataatcacctaaaacaacttcgtcagccaaattccccaccagcgcagcatttttaattccattactcaaaggcaaaatattattatcattcttcaaaagcacccaggactgctccgccgcttcttccgcaacagccacatgttccgccgtttctaaaacgtccggtttgatttcgaaatattttactccggaatcaaactctcctgtccgcattctctgaaggaacaatctgtaaatatttatatccaactcgtcttcagtaatatatccattttttacagcgtccaaaacatttttttgaacgccggcattgccgcagtctgtatccgcgccgttcaaaaaccccttagttattgttgcatactgaggaacgttatttatatcttcatcagtaaacagagcttttttatacgccgccgtattgttcaagtctccaaaggctccgcagtcccctgtgacataaccgttaaacccccaatttttccttaataaatcaagtaatatgtacggatttgcagtagacggaatataatcaaaaatcttttctccgttcctgtatactgtagttgcattatatgaactcatgactgaagccggagcggctttttcaacaatatcctgaaaggctctgccgtaatattccctaagtgttttttcatccataaccgacgagcccactcgacgctccttttcacagttatttgcaataaagtgttttatagtggctatcgttttaagatatcttgtatcgtctccctgcattccattaacaaattctataccatactgagccgtcaaatatgggtcttcgccatacgtctcttcatttcttccccaacgcgggtctcttgccatattaatggttgggctccagtaagacaaatttgtctttggatttttgcctcttgcctccgttgccgttatatctgcagctttataaattaacttgcggttccaggtattagacatcgccaaacttgttggaaaactagtggcctttccctgtctcgcaactccgtgcagcccctcgcgccaatagttatattcgctgactccaagacgcggtataggttctgacatatttgatacttgcgcagctttttcttccaaagtcatcctagctactaaatccgctgcacgctcctcaaaagacaaacgtgaatcctgatacggaagtttatttttactccctgaaatatcaatttcattttcattcaaacttgaattagtttctgcactgtcatttaactttttttccattcttaacatatatctcttcctccgattttactcaaatatatctttatccgccgatagtatccgcaattccgtaaaagtaaccataaaatgtcacataacaaaactataacctatttataacttttgtcaagaataatttaacaataatacattctgttaaaattattaattaaactctacaaatattaaactgctgtatcactcaatatttaatgtaaatttcatgaaacttcagctgcttaaattattagttatttgataagcttgtttaaatttttatcaactcaaatttattaacatatctttttgcatgagacaatttatcgaccaagattttaactgtaaaaattatttaaaactctctgttaaatatagataaatattcggattgattctattttacttttttatcctgctaaaggacatgaaagattttctataaacaaattttgtattttacttgtattctaacataatataagatataataaaagccagtaaagataaaaaagtggtcaaaaaatgctgcttattatttggatatggaggaactgatatggtaccgttttatgaaatacagccttctgacttaacagtaattcataattaccgtgaaatccgttttcatgctcatctgcatgagtacattgaaattgcatatgtttttaaagaaggtcaacatatagatattgacggtatagaatatgaaatcaaatccggacaggccgctgttgtatttcccgatattgtgcattactattatcggaatgaagtcagacctgctgacgaggtgttggttatatgcagtcccaagctgtttaacggcatgttcccggatatgagttccgtacgccctaaaaatccgattattactgatgttgatgaaacaacaaaactggcgtttcagcagattgccgactgcacctccttccccgaaaagttgggttggtcgctgattataatgtcaggtattatgaaaaaaataagtttggaacacggcaagcatatacccgttgagagtcttacccaaaaaataatacaatatatgactataaattttaaacaggatatttctatcgagacattggcagatgagttttccgtcagtaaatattacatctcacatatcttttcagaccgtataaaaattagttttagaaactatctggcgctgctcagaacagaatatgcagcaagtctcatgaggacaaccgacgacagcattacaaacatttgcggctgtgccggtttcgccagccagcgaacctttaacagagcctttaaacaaatttatggtgtgacgccacgcgaatataaaaataatatcagcgaactttacaaagaataaaaaatacggattttccatcggaaatccgtatttttgataatctttaaatcttatcaaattactgatacataatattcggcatcaccgtattgattttgtgtgccgccggcaattttatatctcccagtaaacttccgtaagtaacggagttctctccatacatatctttgatatattcaatagaacgctctaagctttcccgctttaattccttatttatatcttcaaacatatttaattgaacatcaactttttcagacacaaggtttatagcccgaactgttacagccctaacgctttgtttccattcataatgctgtttaaaaagctcaaaagccttttcagcaagtccaaacgcactatatgacggctttggcatcttcatttgaaattcctgataatgcaggtctttgtctttaatggcgaccgcaatcccttccggcatcagcccttgttttctcagacgtcttgatacctttctgctcaattcaaatattactttccatacctctgtttcatcattcaaatcctcaacgcaggttataccgtttccaaccgactttaccggcggtatatactcatacggagctatttgagtcccccctctgccattggcaaaattccatagtttaacaccgtttatccccagccaatttcttaaatggtcaggatttgcgttggctatatcacctatagtacttactccgtgatgaagtaatttatccgcagttgccctacccactcccaacatttctgatgcaggcagaggccatactttatccttatacccctctctcgttatgcaagtgacggcgtcaggctttttcatatcagagccaagttttgcaaaaatcttactgaatgaaactcctatagatactgtcagacccaaagtctcctttatctcttctttaattttacaagctatttcataaccgtttccaaacaacagcgtgctgccggttacatcaagccagcactcatcaagaccaaacggttcaataaggtccgtatacttataatatatttcatgcgctaatttagaatatttcatgtaaagttcaaaatgcggttcaacaaccactaaattcggacacttttgtttggctttccaaatttgttcccccgtgctgacgcccatagattttgccttttcattttttgccaacactatgccatgtctatcgctctgcctgccgcacacagctacatatttatttcgcagattcggatttagcatacactcaaccgaagcataaaaattattcatatcactatgcaatatgattttctcattagttctgtctattttcatacctgcacttttcattaccgcatatcctcccatctgtaaaaaaccaaatacgcaactaattttcacatatacattatatgcaattataatgcacttgtcaataacaatattgcaattatatttcataatatttaacatatttcttaattataaaataactactacaatcaaattaactcaaacgtttgataattttaaacataaaaaacccgtcaagacaatgttgtcttgacgggttttaattgggaagaaatctataaataattttaattatttatcagttataaaggtcttaataatttgtcagataatcaaatcatagataaaaataatatatctgtctgcaaaacagaataaataattattatgttttaaattaatttacaggtgctgaattgaagctgtatgccaaagttagagcggcttaggcaaaaacagcttcattcagaagggtataatttaatcaacacctgaccaaatatataagtaaaacagtcataactcttatcaatccagacaagatatactgtttatatcaacattaataaacctttcttattattacataacatattttatcaaatactctgattaaatgatagtcaaaacaagtaaacttttagtcaaaaagtgttaatttcaattctttggctgttaattcttacatattcaaaatataaaaatcatcgatattatactttactctaaataaataaaagatgtccatacttgaagtgaaccccaaagtatagacacttttatcgtatcagaatctttgttctcaaataaccaaaaactatcctgtaagattaaacattgctttttaccttaaattaatcaactatgaactgcacttttacataactaaccgattttaatcagtatataaaaaaataatattatctatttctaagaaaagatttataaaaaacgacaataaaaattacgtacaaatatcagtacaaatattatattcgaagttaaacaggatattatagataaataaaaatataaataaagcagttacaaaaagttgtttttaaattgtatatcactcttaaatttatatcctctgtgattcatactttcaattttaattccaaccaaattactgtccgtatcaagagcgttggcagtttgattaacatcataattgtatatattaacaagttccaaaatctcatcatccgaaattagtaaatcagcagcaaacatattagcctcatattcaggtcttgccgtcatatcatacagcataaactcctgaagcgttctgttttccgccaggtctctatgaagcatgtcatgccctaattcatgagccaaaacaatcctcttcttttctcttgacaaattattatttaaaattataacacgcttacgtaaaattattgtataaataccgcacaattttgaaaaatctgaacttgttcttaccataattcctaaatacttggcaatctcaaatgggtcagaactaccggaagaccgaatcagctttttagttttcaaatagatatcctcagctgtcaagctattcaacctcctgtcctactatatttataaaaattattttatgtattttttaggtgtatattttttattttcatctttaacggaaaaatatgcgtccgaaatagccttcatagcagcgtccatatcctccctcggcaaacttccgccggcaaacaatccgcatacgccttttattagcccctcaacatctctcatagaacctgtgccgccttttttataagcgtcaaaaataatctcctcgtcctctgtcaacagataattcacatccacattcaaaacctcggctaacctataatacaaatcacgctgtttgggatgcatacccgatttctcataattctgaacagtacgcagagatacgccaatagcagccgccaattcaccctgactcattttattttttttacgcaggttcctcaccttttcgccaaatttcatattaatacctcctgcttaatgcaaatataattctcatatcatacataaaacgaataatatcttcatacaaataatactattttacaacaattttgtcaagcattatcaatagaaataatataatcttctatttttattttaaaccactatatattattttttataatttgtcatattaaactgatatactattattagtactaaacaaaataattaatttatattttgttatatactttatttcactatcaaatttgtaatataaaaaatactatatataaactttaaattaagtttgattataatattattaattctatagaattaaaactttgattaattgatatattagactacttattttagccaaaatgctaaacaacaaatacaaacttttaatataaattaaatttttacttacacacttaattcaaaatctcccatataaaattgatatgtaaagcaatagtgctgtttctaataatatctattgttggtttccataatattttttctttaaaataacttatttttcagcttacagcataactaaacaaatccttcaaaagacataattaaacaacttctgtcttaagttctgtcaataatattttaatgttctgtgataaaacaatctaataaaatattattgtatttttacttttcataacatcactaataatatttataaataaattttatataatatatttcctcaataaaacaaaccgactaaaattgagtaattttttaaattatataattaactaattacagccgaaaatagtacaggctaagctcaacctaatttaagactttatttcgcttgattacttatattgagctaagaagaaaaaagccgttcctatatagatgaattcaaataaaagtaggttcaactataacataacgtaaggcgaaaacgatatatcttacgttaagataatatccccacctcaccactgaataaatggcttaggcagcagcagtaacatgctccttctgtaaaaaagataaccattccgccgaggagcaggaattattagaactgcgtaaaggtaaccgattattggagactaaataaaaatggtaataaaaaaacatctgaactttataagttcagatgtctaaatggtgatcccgaggggaattgaacccctgttaccgccgtgaaagggcggtgtcttaacctcttgaccacgggaccaaatggctcctccagttggactcgaaccaacgaccctgcggttaacagccgcatgctctaccagctgagctatagaggaatatttaaaatccgcaaaagggcagaaaaaatctgctcttttgcaaaattgttttggcagcgtcttatgttcccgggcagtcacccgccaagtattttcagcgctgagaagcttaacttctgtgttcggtatgggtacaggtgtgaccttctcgctattgccaccaaatgcgactacactttttttaaaagtgtatgtaataaaactaaccagttttatcaaaccttaaatgtcaataaatcacttagttgtgatgtatttgcgactactgtgactacactttttctaaaagtgtatctgatgaaactaacttgtttaatcatgccttcaatgtcattaaatcactcagttgttatatactgtggctacacttttatttaaaagtgtatgttatacaaactatctagtgtcatataatccacaaatgccaataattaacttagttgtgatgtatattattaaactaatatattatgtttttcaattgaaaagagaaagtaagaagctttcttactcacaacatagttcataaaactctcgccttatacttcctatgtcttttaggtcaagccctcgacctattagtatcggtcagcttaatgtgttaccacacttacacctccgacctatcaaccacatagtctacgtggggtcttacttcttttaaagaatgggaaatcttatcttaggggggacttcacgcttagatgccttcagcgtttattccttccgtacttagctacccagccgtgcctttggcaagacaactggtacaccagtggtacgtccatcccggtcctctcgtactaaggacagctcccttcaaatttcctgcgcccgcgacagatagggaccgaactgtctcgcgacgttctgaacccagctcgcgtaccgctttaatgggcgaacagcccaacccttggaaccgactccagctccaggatgcgatgagccgacatcgaggtgccaaacctccccgtcgatatggactcttgggggagatcagcctgttatccccagggtagcttttatccgttgagcgacggcaattccactctcttaccgccggatcactaactccaactttcgttactgctcgacctgttcgtctcgcagttaggcttgcttttgcgtttgcactcttcgtacgatttctgaccgtactgagctaacctttgaacgcctccgttactctttaggaggcgaccgccccagtcaaactgtccaccagacattgtcccccgaccggtttcacggccgcaggttagaattccagtatcacaagagtggtatcccaacattgactccacacaaactggcgtctgtgcttctcagtctcccacctatcctgtacatgcaataccaaaatccaatatcaagttacagtaaagctccatggggtctttccgtctagtcgcgggtaaccggcatcttcaccggtactacaatttcaccgggtgtgttgttgagacagtgcccaaatcgttacgccattcgtgcgggtcagaacttacctgacaaggaatttcgctaccttaggaccgttatagttacggccgccgtttaccggggcttcaattcagaccttcgcttgcgctaagtcctcctcttaaccttccggcaccgggcaggcgtcagcccctatacttcatctttcgatttagcagagacctgtgtttttgctaaacagtcgcttgggcctattctctgcggcctgcgctagcaggcaccccttttcccgaagttacggggtcaatttgccgagttccttaacaacacttctcccgctggtcttaggattctctcctcacccacctgtgtcggtttacggtacgggcacctcatcaatccacacagcttttctcgtcagtgtacaatcatccacttcgctacttaattttcgctccctttcgccgcactcgaccatcggtgcggttggattatgttcctgcgtccctgtgcttaacaatttcggtggctacggaatttctaccgtatgtgcatcgactacgcctttcggcctcgccttagctcccggcttaccttgagcggacgaaccttcctcaagaaaccttaggttttcgaccattatgattctcacataattctcgctactcattccggcattctctcttctatctcgtccacatgtccttccggtcatgcttctccctataatagaatgctcccctaccaacttgcataactattagatcacacattccttttttccttacttcaatttcccgtctgcttcacagccggttttctttctctttctcatatgtgttctaatagttatgcaaattcccaagcttcggtataggttttagccccgttaaattttcggcgcctattcactcgactagtgagctattacgcactctttaaatgtatggctgcttctaagccaacgtcctagttgtctctgcaactagacatccttttccacttaaacctattttgggaccttagctgtgggtctgggctgtttccctttcgaccacgaaacttatctcccgtagtctgactcccggacatcatttttgcggcattctgagtttgatagggttcagtaagctatacgccccctagcccattcagtgctttacctccgctaaactaatccgaggctagccctaaagctatttcggggagaaccagctatatccgagttcgattggaatttctccgctacccacagctcatccccgcatttttcaacatacgtgggttcggtcctccaccagattttactctagcttcaacctgtccatgggtaggtcactcggtttcgggtcgtatacatgcaactctttcgccctattcagactcggtctccctgcggcttcgaaccttaagctcttaaccttgctacatacatacactcgccggaccgttctacaaaaagtacgccgtcacactttaacgtgctccgactgcttgtaagcacacggtttcaggttctctttcactcccctcccggggttcttttcacctttccctcacggtactgcttctctatcggtcattaggtagtatttaggcttggatagtggtctaccctgcttcccaccgggtttctcgtgtccggcagtactctggatcctgctcgctcttcgtcaatttcgtttacggggctcttaccctctttggcttgacttcccagtcaattctactatcaactctgaatgcgtttcgcagtcctcaaccccgatagtattactaccatcggtttggcctctttccctttcgctcgccgctactcagaaaatctcttttgatttctcttcctccgcctacttagatgtttcagttcagcgggtctccccacatatacctatttattcagtatatgctgacaaagtattgctttgccgggtttccccattcggaaatctgcggatctatagtcatttgcaccttcccgcagcttatcgcagcttgtcacgtccttcttcggctcctaatgccaaggcattctccatgtgctcttcttcgcttgacctcgtcgtcgttcccttcgcttatcgactttatgaattctcataaagtctcatcgcttcgggactcctcctctcaaattaaaagtaaacttttaatttgctttttaaagcccttctgctctttttgctctgttcacaactcttgtagtgaaatatttctatttcacggtcgctatttagttctccttagcgattaatctttcgattaattttaatcatgtgagtaagttttgttaatactttcttagaatagtttttttacagctcctatctctagtcgccgtattcccagttacccttgtatgaatctcttcatacgcgcgttctttctgaaaaaacctgatcttgtatctattttcataaatactcatcatttttccgtaatatatgacctgtatcatatactacgtcaaagtatctttcataattatttctaatcattactccttactcttctctttattcaattttcaaacatcttctcaacctatccaggttcaaatcctgtcacctcgaccatttattaaaagccgtaaatgcacatatttagcgcatttacggcttttgtgttatatacagcacttttttaaatttagtataattaattaaaattcattataaatgtcagtcaaatgtcagtcagaaatataagcatattatttacattataaaaaaaggatagcttgtatactatcctttttcattttaaaattatttagttacaaataattattgtgttataattattgtgttatttcttagactttgtaactctgtcattaggcacataacctaacttttgaatatcagaaacaaacttatttatatctatctcgccatttattataaagttaatcaggctaatagaagatggaaacctcttaccgctttcaatatctgcatattgtcttaatgacatgcagcatttttcagccatctttccctgactaatattaaattcttttcttttaaaatacagaatattgctaaaacacatttttaaaatgtcaattggttccataattccacaccctttgataaaatatacaaatattttatcaatttatcttataaacatatatgtgatatgtctcacatttttgttttttaataaatattttgatgttgaattatgaaaattaaaagaaggtagacacaaaaaatgtctaccttctttctgtcaaagccctatcttttttgttacttactttcccgtttatttatttggccaaaaaactaaatatatttctctaactgattctagcaaaacgataagaatatgagataaaaaaaatatatttgtcgccaataaaattattattaaattatcacatactagatattgtaaaaatatttgtattattaaaaataaaaaataaaaaacttcaactactatattgtaagtaatatttatcatcaataaattgaatagagttatcttaatattatttcttttagatttgtttgtatcaacatgctcttttctaagttgaattatattattactgtctgatgtaactagaacagttataacagctatcgaaaatgataacaatatagcaattgaatttatttgaatgtctataaatgattgaaacaacttaggtaagtatattttatctctagacagaattacaatcaaagtaagcactaaagcaattaaccctgagattaacatacctacccatattttgtccatatatttgtaataatcgtacaccggtaatagtatagttttttttacaaatgctttaaacctcaacactttcacctcattccaattttaattgttctaataattgctgagccttttgaaagaagtcagcgctgtctacctcgttagtatcagatgtagtttcaacaataattttttcttttttcttaagttgttccgtatctaaaattgtatctccacctgattttacacataatctctttacttcattctcgttattatcaataagattataatatctctttatagcatctttagatatatatggactttttcgtccctttcgtttaaaaataatatcaacatattcagacatatcatctctatcagcaaattgtaaatacttatcatcaagagaatttctttcaacagttaactttaaaagagtaaacttttttgcaatattaagtttagctaaaaacccttcatccggaataaaatcactcgaaaaactatacctatactcatgattactaatatctgcaaaatttttcattttatgatataaataatttacaatttgacttattcctataccgttataatttttttcaaacatacataaaaatgtattacaccccttattatgtctaatacataaatgagtgcgttcttcatcaccatcaaattcacctttgagtattcctaaattatccatagttgaattatttcgaacatttcttctataattatacttaagtgacttaaagattatattataatttctgttatccaatgcctcaaaagagtccatccatagagtcttatttttatttggatattctattcttctttcgaccaatgtttggttagacaaattattcattgcatcaacaaaaaaaggtataaaatcctcaatagtaccttctggtaaatcaggcgaagtagccgtaatagttaaatttaagtaataaaaaccgacagagacatttttattcatacatatatcctccaaattaacaaaatattatttatctagataatacaatattttaaaataaatgtcaatatatgtaaaatatatcttaaactctataaaatatttattatagtacattatataaccaatcttgtgtcagtgcgtgccaaaaaaataaaggcgtaacaaatttatttgttctgcccttactattactccccatatatccccgcgcggtcgttaattattaacattctcatcaagtcataggtaagccccagcttgccttcctcatcgccttttaaaaatcccttgtcaaccaacttagttattgtcggtcttgcccactcaggcatattgtcatctatgtaatcataaattttagattttgcagtgttcctcaattcctcaagctctgttcccatttgattaattatgtcattctgacggtcgttttctgcctttaattcttcatattctctgctcattagttcgtcctcgctttccaatttatattctatccccaaatagtcgcatatacctttgtatatcgctgttgcgcacttatattttccgtcctcgctggctaaaaatctattgtcgtcatagttatctataaatgcagtctctaccaatatagcaggcatatttgtgtgttttataaccgcaaagttagcagatttaacacctctgttatacctttccgtctccgcggccatattcggctgtacacattccgctaacgccctgccctgcgtgctgcctgtgcaataatatgtctcacagccatacgcttttgtgtttgccgcattgcaatgtattgatacaaatacatctgcattccagctgttggcactgttatatctgtatgcaagactgccgtttaagctgcttgatactgtatcggtaatactatcacggctcatcttaacagtttgtccgctaaccaatagtaattctcttagtatcactccaatctgcacagatacatcttgttctttcaatccataccccacggctcctgtatccgctccgctgcagttatgtcccgggtctatgtatatctttgccattcttattcctccaatctattatattataacaaaaaaagaatgcccctagatgacattccgtaatgctattttaacttgattttttatgtatattcttgtataatactgtcaagcaggtaagaggaaattgaaggacggttgtcatctccatatgctgtttctcacagctgaaaggaggtgtcgcttatgtggaagtacttattaaaagtaattgtttcaatcataatattacgctacgcgtgagatgtctgctcacctaacgagacgcgcaagcgcgtccttccgatgttcactaaaaaactccgcatataagaaaatatttaaaagttatataaaatgcggtgtagtaagcatcaccgtgatgcaactgtgaccacatccttgcgatgtttactaaaaacctcatatataagaaaatattttaaataaaatttaatttttacactgtttccagacatattattttaattcaaatcaattaaactgtttgcaataaacgttaagtttgctattattttaaatgtataaaaagtttatataaattacttacggaaaaaatttttgaagtttattatcattgttaaataataattaaaatatattaaaaaggagattattaaaatgaaacttaaagataaaacagctattataacaggggcgtcaagaggtataggttttgccgttgcagaggctttcgtgagagagggagccaaagttgcggtgtgcggaagccgggtatcttctgcacaaaaagcagttgataaactaaaagaatcattcccggaagcggaactgattcctgtaggcgttgatatttccagcagtgattctatagctgaaatggttaaaaccgttttagcacagtgggacaaaatagatatattggtgaataacgcaggggtgacctcagcaaaacatatatttgaaatgtcagatgaagattttgattcggttataaggataaacctatcaggtccgttcaagtgcataagagaagttgccgctgttatgaaagagcacggcggcggcagtatcataaacaccagttctatggtcggcagttacggcggcaagatgcagacagcttactcatcctcaaaatttggcataaacggtctaaccaaatcatgcgccaaagaactcggtcagtataatatccgggttaacgcagtagcgcctggcgtggtattaaccgatatggtagcccattcggtaaacgaccaaatgatggaaggtatgcgccggattacacctctcggacgggcggcggaaccgaacgagcttgccggcgcctatgtatatcttgcctctgatgattcgacatttacaaccggaactatcatacatgttgacggaggactggttatgtaatttagtgtttgctgtttggataattaattatatacttctattgctcagacatttcagttaataatttcagtcaaacagctaggtcaaacagttctgtcaggaaccttatgcaaacatctttgtcggtcacctcggtcaggaacctcatgcaaacatctctgtcagtcaccttggtcaggcgcctcgctcaagcttctcggtcagacgcctctgtcggacgtctcattcggacattactgtcagccagacttgcaagtttttatcgattttaatttttatataaaataaaagccggacatattgtccggcttatttttattttatcttattgtcaggcagtatcggttttactcctcctttgacagttggttttcccctgtcaaggcaaaaactgaactctgcatactcgccttcaacactctttacctttatatccttgccgtgggcgccgagcatactctttacaatataaagacctatgccggtgccctctttgtttatacttctggacttatccaccttgtataatctttcaaatataattttttgctgttcttctggtattcccacaccggtattatgaactgatataaacacttcgctgcctttaggacatgtggttattgttattgttccacggtcataagtgaactttattgcgttatctataagatttgttataaccatttttatcttatcagcgtcggctcggacataacaaacatcattatcaaaaaccaaatcaatatttaagtttttcttatctattttaggaccgagaccgattataataaggcggataacctcatttatatcaaaatctgattttacgatattcaccttatccgactgcattcttgttatatccaagaaagtattaaccagtctggacagcctcgtcacctcatctttgacaatgctcaaatactccttctgcttctcaggcggtatagtatcgtctaaaataccgtcaataaatccgcctatggttgtcataggggttctgagttcatgagaaacatcggaaataaaactcattcttatatcctcagacttttcaagttcgtcagccatgttattgaacgcgtcagcaagttctgttatctccgtcacgttctcgtccaccctgtctatagcaactcgtgatgttaaatcaccgccggcaaagtcgctggcgctcttactgactctttttattgggttagccaaaatcctggaaagcatataagaaagaataaacgaaaccactataaccacaatagccgaaaataaaaggattttaaacagctcaaaaagcatgctcctcctttgcggtatcggcgtgcttaccagcacagcgccataaaccgctttgttttctcctcttataacaggaacttccagggtgaacatcgtttcattgaaagcgccgttcatggttcctacaacggttacacgcttgccggacaatacctcacgcagatgatctagctctaatgattctcttgactcgttcgcccagtaaccgctttcagtagtgttaactatcaccctgccgtcaacgtccgtgattataatatgactgctgctgctcctggaaaaaccatttaaaaccgagttcagattctcctgcgatatgccgttgtttattaaactcactatcgattcagcatttttggcgagtgtgctctcgttttgttttgaaatatagttgctcatcagaaccatttgaagcgacgccaaaatgattattccgataagaaccgtagataaatttgtgaacaatactcttgaaaatatagttttgccaaacaattagctcacctcaaatttatatcctactccccaaaccgttttcagcgcccaggttctgttttcaccctcaagtttctccctgatacgctttatatgaacatcaactgttctggaatccccaaagaactcatagccccatatctcgtcgaggagctggtcccttgtgaataccttattggtatttttagcgagaaaatataaaagttcaaactccttaggcggcatctcaacctttttgtcgtcgatataaacttcataagtagactggtttattttcaaaccgtcaaaactcagctcgtcctcgtccgctttctcatcaactgagtctgcgcttcttctgagaaccgctcttattctggctataagctccttcggctcaaaaggcttgaccacataatcatccgcgccaagttcgagacccaagaccttatcaaaagtctcgcctttggcagtaagcataattatcggaaccttactctgcgctctgatttcacggcatacctgccagccatcctttattggcagcataatatcgagaagaattaaatccggtttctccttattaaatttcgccacggcttcttgtccgtcattggctataatggcgtcaaagccttccttttcgatatatagacgcacaagctcacatatgttttcctcatcgtctactattaaaattttgggtttactttccataacaaacacctccgcatttaattctaatcaaattttaagtatctataaaatttatagtataaatacttttactttatttcaatattatagcacaagttttcataaatgtctaaataatttatgaacaatataaaaatattttataaaagtttggcgtttcgggaaaactagattaaacaactatgtaaggaggaaaatataaatatgagccacgcaaaaacagcagccgtaaccgcaaacggaatggtaaaagcaaacagctcggttaaagtcaagcccgacaaaaaaattttaaaacatgagcaggcggcgtattcaagacttagggctgaagctctcgacgctttggacgattttagacgctgtcagaacaactttgattttatttgtgaagacaaactaatagacgtatgtatatatgatatccaaaaaacaatgagccgatacgaatatttggttagtgaactaaaaagaataaacggcggcagccgctagaattatttattgatttataattagaattatttgttaatttacaatactgtatttgattttctcctaattaaaatttaaagcgtccggattataaacttcggacgctttgtatttttaatatcagtctgtctccgggctttgcccttgacataacaaacggctagcggtataattatttagtatcgctttggttatcccagggcggcaattaaaaataaaatgttgtttaaacgataaatatatgaggtgataaaatgaaatatgttgttgttttggcagacggagcggctgacacacctgttaaggagcttaacggacagacgccgcttgaaactgcaaataaacctactatcgatagccttgcaaggcacagcgaagtcggtatggttaaaacggtcccgagtaatcttcctcccggaagcgatgttgcgaatctagcagtatttggatacgaccctcaaaaatactatacagggcgttctccgctggaggctgtatctatgaacgttccgcttgaactcactgataccacattcagaaccaatcttgttacattatcggacgcggagaattacgaagataaagtaatggttgactacagctcagacgaaatttctactgatgaagcccgagagcttataaaatacgtcaatgaaaaacttggctgtgacgaatacgagtttttcggcggattcagttacaggcacctgatggtttggcacaataaagagaataatttcagccttaccccaccgcatgacatatccgaccgggtaatcggtgaatatctgccaaaggatgagaccatacttaatttaatgaaaaaaagttatgatattttaaaagaccaccctattaataaagaaagagaagcaagaggattgcaccctgcaaactccatttggatatggggaaacggaaccaagccaaaccttgacacatacaaggaaagatttggaataaaaggcgcggtagtctcggcggttgaccttattaagggtataggttactgtgccggacttgacgttttagaggttgaaggcgcaacaggaaatgtaaacacaaactttgacggcaaagcagaagccgcaattaacgcccttaaaggcgataatgatttcgtgtatattcatcttgaagctcctgatgaagccggacaccgtcatgagatagaaaacaaggttaaagctattgaacttattgaccaaaagatagtcgcgcctgttttggattatttggttaacagcggcgaagatttttctatccttgttatgcctgaccaccctacgcctcttgccaccagaacgcattcttcagagcctattccttatcttttgtattccagcaaaaataagattatcgacagcggatgttcaagatatactgaagaagaagccaaaaagaccggtatatttaatgaaaacgggtacacacttataaataaactgtttgaaaaataaaacttgcatttattgacactttctgttattatatctttgtgtgcttactcagcaacagttttactaaataagagcaaagagccggatttttattctccatctctcagcccttaattattcaaggagtgattattatgccaacaaaagtcgtgattggtgcccaatggggagacgaaggcaagggaaagacaattgatatactggccggaaaggctgacgtcgttgtcagaacttcaggcggcaacaatgcgggtcatacgttaaaggttgacgatgttacatataagcttcatgttatgccgtcaggaatactttatccggatactcttaatattatcggatgcggcgtcgttgttgaccctaaggttttgcttgaggagattgacgggtttgagtctaaaggaatcagcaccaaaaacctaatgatagattccagggctcatgttatcatgccgtatcatattgaacttgacggtttgtcagagattgcccgcggtaaaggcgatattggcaccaccaaaaagggtatcggaccatgttatatggataaagccgaaagatgcggtatccgtatgagcgaccttattgacaaagaaaaattcagtgaaaaggttagagaaaatctggctataaaaaacaagatgatagagctcgtttatgggggaacacctcttgacgcagacgctattataaacgaatataacgagtatgctgacaggctccgcggttatgtatgcgatactataccaatactttatgaagctgttgaaagcgacaaagaagtattgtttgaaggcgctcagggtatacttcttgacattgatatcggaacatatccctatgtcacttcatcacatccgatttccggcggcgtatgcgtcggcagcggtatcggcccgaaagctatagacgagtgtatcggaatactaaaaggctacacaacaagggtaggaaacggaccgtttccgacagagcttgacgatgcggtaggcgaagctataagacaaaagggatttgagtttggaacaacaaccggacgtccgcgccgcacaggatggtttgacgctgttatagccaggtatgcggttcgcacaagctcgctgacctcaattgtatttaataaaattgaccctctcggcggtcttgacaaaatcaaactttgtgttgcgtatgacaaaaacggtgaaataaccaaagacttccctccaactcttgaagagcttgcagagtgcaagcctgtatatgaggaaatggatggctggaaagaggacatcagcaatattaaagagtttgacaaattgcctgaagccgcaaagaagtatattcttagagttgaagaattaataggctgtaagattacttctatcggtgtaggccccggaagagatcaaaatatagaaaggtaggttatgttaatggcagctgctaccaataaagaaaatgaagagaaaaagacggatgtaaagcctaaaaagaaaacaacaaaaaagaaggttcaggaaaccggcaacgaatatcttgattacaaaggcaagaaacttgtcagagtaggcaacgagatatactacggcaatcctgatgaaccatatatagttaccttccgtcttgaagacagcgaggacttgatggacttatcaatatccaaaagggttataatagagcttaagaccaacgagggaaaagcttcaaagctgattcgccaggcagagcgcgacggattatataaagcttttgatattggaatgttttggcttgaccaggctttagaatcaaataaataactataaaaaaactgatgaagcgtttaactgcttcatcagtttttattttgtacattagttttctcagtttcaacgagccggctatggaaaggttaaaacggacagaaaaattaaaattatgtataataaaaataaataaaaattatatacaaatgtggtcacaaccctgacggtattcattataaacatcgtatattaaataattatttaaaaatgtgatttgcaagcttctttagacgcgcagtctcggaatagattttataaaaggattatgtcaaatgttataagtatgttcgcgcttcgcgtgagatggttgctcacctaacgcggtgtgcttacgcacaccctaccgatgttcaccaaaaaatactgttttgaagatattaattcctaaaaatttcttataaaaaatgtgatttagcaagcttcggagggctgtgaccacacttttttaaagtgtgtgtgatacaaatcactttgtattaataaacctacaatgtcaacaatcaaacttagttgtgatgtgcaaacgtagtttgcctcgttaggcgcgcagtctcggaatagattttataaaaggattatgtcaaatgttattagtatattcacgcttcgtgtgagatggttgctcacctaacgcggtgtgcttacgcacaccctaccgatgttaaccaaaaaatactgttttgaagatattaattcatccctttcggaatgttgtccccctcctaaaggcaggttactcacgcgttactcacccgtccgccgctttccatccttatcttctccccgaagggatccgttaaaaatttctcgctcgacttgcatgtgttaggcacgccgccagcgttcgtcctgagccaggatcaaactctcgattattattgttatatatccaggctttcgccttccaatatactcgattgtttgttagctcttatcgaatactaacgttcgtcgcagcccgcttcgcttttcccataaatttgtaaacaaatttatgctcttcgctccgcagcagctcctcttaaatcaaaagcaagcttttgatttattcttaacccccgcagaactttgttccgcagctgcaacttgtaaagttcgctaaaacttttttggaattgacaaagtctccactcttgcgagtttcttaccttgtgcaattgtcgtaataagtacatctaaatgtatctttattaccgctttttcactatttatttttcaaacatctgctttctgtttctctcgaaacagcttgactataataacacatttaaattatcttgtcaagactttttttaactttttttgaaaaaatttttaaaacttaaaaattgcttcttcatcaagttatgtatgtttgttcttcaaaacatataggtcttttcgaacaacttgtttagtatagcagagacaaattattttgtcaagacttttttcttcttttttttatttattttttaaattagctgatttttcccgtttttacgttgtttattgtcctacttccgcttcccgcattatattatttattagtatatttctaaaatacttataataacttacgttatatttaatactatatctttacagttttccattctcattccgttaggtatttttcataattcaaactatgtataaataataaaaacaaaagatcagagaatgccttcaagcattatttatgctatgattgataaatcaaatttattactcactctattacactattgctcttttaattcagtatcactttttttaagaaaagtacaaaactgttttaagtaatactgaaagtactttctacttaaaaagcgataaataaaagaggggataattaccccctcttattaatatgctattgttttaattttggaactaaaatctcatctctttctatttttttactttatcttcaacaatacttccggttagcttgtcattttcttctaatactgcatagctgtctgattgactttcattttctgtttgtgttccttctccttcatatagtactttatcctcagcaacacttccagttaacttatcattctctcccaaaattgcatagatatctgctttttcactattcaaaacattatcctttccttcagaaattgataaaactctgtcttgaactatttgaccgagtaactcaccatgatttagtgtttccatacggttatccgctccggcggcaaaagctgatcccgctgcggctgtcactgccaatcctaaaactactgatagtacttgtttcttcataagcaattcaatcatttttcggatttgccgtatttttatctttggcttctactgataataaagtctgacctcatttattacttatcataccagacttatttttgtctctctttttagtccgggaattttaacaatgcatccggctttattcccaatgcatcagaaatacaaaatagcatttctaaagaaatcggcttaataatgcttgccgcttctataacgctgataaatgaccggctgatattcgccttttcagctaattccaactgcgtcatgccgagcctttttctgtaatgcgaaatatttaatccaagctctatataataatccatatgctcaaactttattggctttgatcttgacatatatatttacctcttgtgtagtttaataatattttatattattattacaaagcataaactttctattaaaaagctattgctttttaatagaaagcatgatattatttatatcagaaagtgttttatattacatttttattattgattttgttattatcaagtttgtttttccaatgttattctgttatagatataatgaaaaaagtccgaaagaacttttgtttttattttgtctataacaaagcctatatttaaggcttaatgtattaaaaattaaaaatatttaggaggagtcaattatgaagaaaaaaacattatcggttttatttgtatcaatttgtattatcttgtcaacatttatcactgcagccgcagctgaaaacccatacaattactcatcagagccgtcgagagccatttattatgtattgccgactatgaagggcaatgatgtcaaatgggttcagtcggcattaaacgcatttggtaattatggtctatcaattgacggaagtttcggtccggcttgcaaaaaggcaacaaaaaagtttcagtcttcaatgggtatttcccaagacgggtcattcggtccggcaacaaggagcacaatggttaattggcttaaacaaaatggttatgcttccggtaataatttaagctcggctgtttcacaaaaggctttttacagacagtcttccggcggatgctatacagcaagtgcggcaatgataatgactaatctcaacgcatggtggaatggaagcacagccacatattggaacgtatatacagccaatggaaatactgcatatttacaaggagaaactccaggaaaatttggctgcagccgctggaatatttccgcctctaaatcatctgtaatagatgctgtaaaaaaatatcctcagggagttatggtagcgtttaatcagccaaacaaaggatgggcacattgcatggtagctgtaggattaaattcaagcggagaaccactgttttttgatccggctatagacaatggtaataatggcggttacggatacaccttgcctgagacttctgccggaggttcatacggaggagcaggttggggaaacattattcaagtttctgttataacgaaataatttagaattaatactttcaataacattggaattacaaaatatatatacgctgtgctttttcaacaatattgccattaaccgacaacaaattaaatacagccgtattttttattaacctaaacctgcaataaagtaatattataaataattaaaaaatagttatatcaaaaagggagagaagatcatgaaaaataacagaaatcttgtggctttgttattgtcatttattctattatttagtttttctacagtaagcgcagaagggtttaacctgcttagtccaaatttttcatttaatgatgtaaccagtgaaaatcctaattatgattccattactgcgcttgaaagcatgcagttcgttattggaatagcagaggacatttatgcaccggatgatttaactacgcgctctgaatttttaaaaatgttactgtatgctacagaaaatcaagacagtaactgtactgctgaacctcaaataagcgacgtaacaaaagagcattgggcatatgactatataatgattggaagccagctcggcatatttagtttagatgaactgtatgataataatttttatcctgatgattacatagacagagaaacagcagcagtctggatagcaaatgccacaggttattatgttgatactgacgcagtctttgccgacgagaaggatattcttaatttaaatgatgttaaaagtattgttgccttaggatttttagatgttcagaacaaccagttcagacctaaagataactttatacgttctgaggcagcggttataataaaaaaagtatatgacaattacaccgaatcacagaaagaaagggatgaaaccgtaaatgtcgagtatcaagacaacgtaaaattaattactgttgacaaaggtaacaatatagagaatgacacggaaagtaaaacagacttttctaatatcaccgatgaaatgcgtagactgaacacaggagatataattttaatactaccgtgtgaaacccttgcagacggatatatcgcgttaataaaagatattgtaattaatagcacaaacgccacaataaccaaaggcgaattagactcaaatgatatcttcaaaactatagacatatataaaaaatattcagttcttgatgatacttccggtttcactttagccgacggcataacattcaacaaacctgaagaaataaaagttttagataacaacaacatcaatattggtgttctggctgattctaagccggttggtcttaacgttattggcttacaagtcggaaaatttaaattaaacggaaatattaatataaacgactttaatataacacctgatataaaaggttttaatgactataatataaacgctgatatttcaattaccgaagatttaactgccaaatataatatagaagaagatgcagatgtttatggagcaggcggatattggaagagttacaattcctacattaaccaaagctatagcaaagacgaatttagtaaagatttagaagaagcaaaaaaagatattgctgaaacaagtataattatacacggaactccatttattatatatgtaactatttcagtttgtgtatcagctgagggaaaaatctgctttgaagttaataatactactaaagtagattttgaaattgaaaatttgaacggaaatctttcttttaaaaggaatattaataataatcctaatatttcattggctgcaagcggaattgtaaagtcaggtttagaacttcagctcggtttaagcatatgccgtctaattggtattgagggtgttgttcaaggcggtattggagcaaaatctgagataaatacgaatgataacaacccaaatcacctatgttcactctgtttagacggcgatttatatacatatttacagcttggatatgatattgagcttgcttatttagacccaaagcctgtttatttaaaaccatggatgtcgaaatttgctgattactattattcatttgattacggagattttggctttaaaacttgtcctcatataaaacaaaataatcagcccgttatcggcgccgctaacgaaggttcggctcccggagttgtaacaacagacggcacatatatgtacttcccaatagatgggaatatatggagagaaaacattgacggaagcaatagaactccaatatttaatataaacccagaaactactccaatgaatatacattacagatacaaatataaggatttacagtataacgatggatacttatattgctatggaagccatgattcatatatttcagcagcaaaaacttacagattcaaactctctgatttactcagagaagaatctgaatataattcaaacaattttacgcgaagatatttcgatgattcaatgaaagcccaagaatccggacttacgcaaaaatacggcggcaaatcctggcacatagaaaaagaatatctgttcggcagacaaccgctgaatttatattgcgaaaatgaatcaggagataaacaattgattattaaagatatagaattatattgtgtatataacggtttcgtctattacatacaaaatgacgcattgtacagctataatctcgaaagcggagaaacgcagctgttgaacagcactccacttaactttgaaggaatattcagcaataatatcacttcaggttcctatcaattaaatacagtaggtgaatggatttatttatatagaaagccaaaaggtctaacaggcgatttaggcgaactttaccgtgcaaaaataggagaatatagtttcgaactgctgaaagaaagcgaagaggacaaaaataatttcacatctaactatacactaaatgacagcaatataaacgataataacactagtacaaataatgaatccagtaatagtttaaataacaacggcgtatcaaacgagaatacctttattaaaaataaccatggcgggtatcagctcgacttcaacaacgacggtattcccgaaaatatttacattgaagaaagcgatataaacagcggcacatacgctgtaactatttacaacagcgcaaaaggagagggtgaatttggcctatgcggtgattttgtgcagaccggaaaggcaagcgaatgctatatagtatatgattctaatacaaacttatattatattaaaacagtgacagctttttccgacgcgagagacataacaaaaatatatgcgttaaacggtgttgatttccaatgtattgacacttggggaatttttacaaacaaagatatacccggggactataggaccttatatcgcacaggttttgaagctgtggaattaggctatacctccaatggttcttatgaagcttctgaaagcgaatatgaagaatataaaaatcaatatagtctggatgaaatatactattttggaaacgatataaaataatattttataaacagcaattattttttaagctgttttcagataaatataaataaatccgaaccggcgctgtttaaacaaaaactatattaatataatatttcagcggcggattaatccgccgctgaaatataagagcatttgaatttattactcatataaaattatatcaaaaacattttatacttcattttatttcttttattatattaaacatttgtttcttcccaatacagacttactatgaataatttaagtttaaagcaaaaattaacacccaccgggcgcctaacccggaacaattaaattggaggattgaaaaaatgaaaaatttaagaaaagtattgtgcagtattttaacctgtgtactggctgtgaatctggtctatggcttacagcctgccattgtaaacgccgaaaaagaaatgactgtttctgctgaaacagctcctgaaaatggaaaaaccataactgaaaatattcagcccaacaattcagacgagtacaacttcttggaagatagtgctgcggctgaaaaagaatcttctgaaacagtaaccgatgaaacagccgaacttgcagctgcaaattccaactggattacagcggaaaaattaagcgaaaatgaaaaaaagcaatttacaattaatagtacagatgaagcgctatggtacaaagttaccctgaccggcaatgatgaaactataaaacttaccatagacaaagacggctgggcttttaacgaattaaaatatcgtatttatactgaacaaactctggttgaaggaaaagacaatatcattggttatgattatttttctaatactttcattaaaaacttcaaaacgtctcagcccggaaactactatgttaaaatatatggcgacgttaacgaggaacctttaaatatcagttacactatagttcctcccgatgaaaatgaaaataatgacacctggcagaatgctgctttactatccgaaaatcaagctaaacaattcactataacagccaataacggtatcggttcaattcctgactatgactggtttaagatatccgtgcctaatgataatcaggcaataaaaattaaaatctataacgacgatggttctgattttgaaaacgatttacagtgctcgctgtatgacgaaaaaactcttaaagctaacgggtcatcttatattgcgtacaaaaattacatttcaaaatacaataattttaatatggccaaagtggatgccgggaattattatcttaaaatatatggcggaattaatttaaaaccggtgaatatttcctacgcccttgttccgcctggcgcaaacgaaacaaacgacacctggctgaccgccacatcgcttcagaccgatgtatccagtcagttcacaatcaatgccccaaacgacacagactggtttaaaataggcgttccaaaggcgggtgaaaatgtttcgcttaccattcaaagtctggacgggctggattttgataatcagattttctttaatgtatatactgaggcgactttaagagccaatggttcaagcacagttaaatcaggatacagaacaaaatttatttctgacacatttaccgcggcagattccggaaactattatataaagataaccagcaatgttcatgaacggccattattgattacatactctttaggctcagtaattaccggggtgaccggcgtaagccttgacaaacaatctgtgacactgccgcttgatgaatctatccagctgtatgcacagaccattccggcaaacgcaacaaacaaaggctttgaatggactagctcaaacgtgaatgttgcgactgttgacgcatatggcacggttaaacccaacaatacaaccggaacatccagaataacagttaccacaaaagaaggcgggtttactgcatactgtgacgttaacgttgttcaatcctcaattgtaaaggtaaccggtctttccattgataaaacatcagccgatttgcggaaaggcgaaacactaaatcttaaaacaaatataacgccttcaaacgcaacaaacaaaaacattcgatggaacaccagcaatataaatgttgcatccgtatctaacggaactgttacagctaaagcgcagggaaccgctgaaataacagcaacgtcagaagacggcggctttaaatcagtctgcctggtaaacgtaacagccccggacgcaaaggctgaaggtgtacagctggacaaacacactctctcaatagccgcaggcggcgctgcctcattaaatgtaacattcattccgatttacgcctctaaccaaaatgttacttggagttctgacaatacagccgtagtttcggtagacaaaaacggtaaaataacagcaatatcagcaggaagcgcaaacgtaaccgtaaaatccgaagacggaggcttcacggacacttgttctgtaactgttaacgaatcgccgaaaacatatgattacagtattgaagatttggaaattctgtcagaaaccggagaagcactttcttcaatccccgaaaacggcaatttcataatacaggcatcctataaaaagaacacaaaccgaaatacaaacgactattttattatcgcttattatgatacaaagggctcaatgattggatttaattactctcttatgaatcccgtctcaggaaaaaatgttgctttcggaactttaataccgcagaaggataaaaaagtgtcaaaagttaaggcttttgtgtgggacggtttatcttcaatgaattccttggcggaaagtattgagagataaagatgctcatatttaaatttctttgacatagaaaatagaaaaacgtgttgaagattagatccaaataaagccgcttaaactacccaactgcatccgccctgcaacgcaagtaaccgactgtgttttccgagcatcagcttttctctgagctgtgttgtaattgcctagaattacgtaacactgacagatattttttattttaatattttatttttaccataaatatacgaaaataaaactgctcaaggcttggaaatattttaacttatcgtgacgctgaataaaaataggacttcattataattgaacagatatccaaaggttagaccaaaaatctaacaattggagggtcagctcatattatttgaagccctatttttgtcgctgttatataaaatgactgccattttttgtccatttatacaacggctcttttcaacgttttagccaacgggtaaaaataccagcaatgtgcagacaaaacagatgtgaatacctttgctggataatgtaaatatcgaaactgcatagtgtaaataccggagctggatttaaatctgtattaaataatacataatttgttttttaaatttgtcccatcttatttaacacctttgtctttttcagcgcaaaaagaattacggcggctatcacagttcctcctgctgagctgacaaagaacgggagtatgtacgtccacagcaccgcctcttttcccataagcagagccgcaattggatatgcgcagattcctcccagaactgatgtgccgaacagctctcctatacacgttaaaggtatgtttttggaatatttatataccagtccgcaaagcagcgctccgcacatgcttccgggaaacgccagcaaagtgccagtccccattaagacccttatcagagatgtgacaaacgccattcccactccgtaaaacggtcccaataaaaccgccgccaaaatattcaccaaatgctgaaccgggaaacatcttgaagctccaaccggtatgctgagaggcgaacaaaccacgcatactgctatcaatactcctgctaccgccatcttccacgctattgtctttttcatacaaaacctcctgattttaattttagacacaaaaagggaagcacctcaggtggtgctcccctatatctgtatcagatgaaagaattttatcataaactcacgattatgtcaatagattttttcacttaacaattttagtttcataaataggctgtttatagccgcatttcttacaaagaatatttaaactctttctgtctgaattcacagttaagtttccattaaacttcattccatctttacacctctcttttgttcgttttcaaattcttttatgttattgtcactgctgaacacagctgcaataattccagatatatcagcacctgctttttcgagtatataactttgcattttctcttgatattcagacggcaataccattccgccgtttatgcagacaataataccgtttacagcaaacactctgcctgggttataaaaattctgaaatattttttatatcaaacagtacagtctgataaatggaccgatattatcttctgcaataacagacaatcaaattgtttgtttcctcctttactttaacagcagaatcttcaaaattttctattttctctgtcttccttaatccgattcgtaatctatttgaattaatccaatactaaaatttttatttcaatacattttacaaaaattatggtcgtactaaataagtaattgtatattaacttaattgttttatgttggaacaggtgctataatataacaatataaaattttattagaaagagaaatcaaacatgaaaaacaaacttacatcaacctacactatttgtttcggggctatgctcagctgtctcctatggggaagcgccgctccatgtataaaaatcggctattcgctttttgaaataagcggaactgcgtcccagctgctgtttgccggaatcagatttattatcgccggaattttaacaattttattcggcagtatattgagccgcaaaattttaataccgcaaaagtcgtcaattcccgatgttttcaagctcgccatggttcagaccgtgctccaatacatattctactatatcgggctggctaacacaagcggcgtaaacgcttctattataaacgcctcaaacgtttttgtttcactgcttttctcatgccttctatttagattcgaaaagctcacaacgcgaaaaatattcgggtctgttatcggattcctcggggtaatacttatcaatataagcggcgcggcaataaacggaaacttcagttttgccggcgagggggctatttttatgtcctgcttatcctacgggctttcatcctgcttgataaagcggtattcacagcgtgagaatcctgtgaccctaagcggatatcagttcttcacagggggaatagtccttaccattatcggatttttgtgcggtggacggattactcatgtttcaacccaagctgttatgcttttgatttatttggctcttgtttcctcgatagcatacactttgtggggaatactgctgaaatacaatcctgtcggaaaagtggcggtttttggtttcatgaacccaatttttggcgttatactctcagcatggcttttgggcgaacaaaatcaagcattcagcataatcggagttgtttcgcttctgctgacctgtataggaatttatattgttaattcaaattcaaagattaaaaatttatcatagacttcaacagctcatataaattttaaacgctgggatagcaacatgaataaatactgtcgttttagcactaagcagattttgttaatcacacagattgaaaataataatgcagtattacttgtcaagatataaataagtcagtatttacacaagtattctgcaataaattttatttttaagaattaaactatttatcctcatttttggagattataattatttgtataaattaaagcggaaaccatgcggcttccgctttaaatatgttatttataaaattatatgataagtatctataatataataattaattttatttaatccttatcaacatctaacatgcaaaatacactattagtataaaatccgtcatattattttcttatacataaaatacgtaaaacaagtttattgatatataaaactaaatcaaaaagctttaccgggactgcgcgccttgcgcggcaaactgcgtttgtgttgcgtattcatattattgtttgcgtattcatattattgaccttgtaggtaaatcaaaacaagttattttgtatcacacccaccatgctggtggggtcacagacattgtaggtttatcaatacaagttattttgtatcaaacacacctactggtggggtcacagacattgtaggtttatcaaaacaagtcactttgtatcacaaccaccatgctggtgggggtcacagacattgtaggtaaatcaaaacaagttattttgtatcacaaccaccatactggtggggtcacagacattgtaggtttatcaatgcaaagtgatttgtattacacacacttttttaagtgtggtcacagccctccgatgcttgccataccacattttttatatatgaactttgatatttccgtctgctttattgcggactttccgcattatagttggaaagctaataaaaaccaaaaatgttcactataaacacatttattttttctgtctgtttttctgtttaccttccaataccctattttaataaatcagaaagctgcttgtcagtctcttgcagtaaactctgtatctgtcctgtaatataagttatattttcattaatagatctcgtgccatccactcttatcacaggacactctaatgattgcacccattcctcaacatatctccctgttcgggaacttactttatcgtaaaatgttttttcctgctcgtacatatctcctcccggtaaaattctactaccgaatttctgcaaagagcgctgttttattctttccaaacgaacctctttcggaacatcaatcaaaactgcataattataaaacgacaaaacatcttttccatacgctccttttacagctgcaaacacaaagtttttatatgttacgacttcattcaaaaggatcttttctacctctttatcagaacgtgataaaccactgctataattggaagctgtctgttgaaaaaatagattttcaatatcaataaaatgaatttcaagtttctccgcaagcgcttttcctaacgtactctttccgctaccattcaagccgcacacaataattcctattcccatatatatcatctttccatttttattaataaaaatataaccgcgaataagacagcgcacaacaaacaataattttaatatatattttaagttggctcacaattaaaaaattttttgcatttatctatcttatatttaattatattgaaaatccaccttataagattttataagttcctttgccaaaggctataaacccttatggaatcgacatttttgcttatcaattaagtttccatcgcataatcttataaaatcaagcagaaaattggcggaagttttcttattttgtccacactaatacaatcaatagaatccatacttatcggcttttaagccttgacatacttatttaaacctgacaattaaaacttataccgccgctgtttatgtccaagttgaaatatcatactcaattgcttttggttttaaagtaattatcaacaccgacagcaatcgccctgcctatagtttccgaatcgtttgtcagcacttctaagtcggatgcattatcaaaaaatccaatttccaaataggctatcggtacgggacttttgcagaacaaaaccgcggttgggaaaccttcatatctcccgtctacaaaagcggacagctgtgtgtctgaaacgatttgattatttataagctgacccaaaatattgctctctgatatatattccgccggcgcaagaacaccgctttggtcatacactcccgacaaagccatatacgcgctgccctgacctccgccggcattggaatggatacacacaaagacgtccgcgtccggctcagtagaagtgtcgccgcccgaataacaatacgtaagccgttttgtcattgacgggttttcatcgttcgaatttcttgtgagccttacctcataacccatttcctcaagatattttttggcgtttagggtattgtttaaatttatttccggctcaatatccctgtctccattttcaattggataccagcagcttcctccgtcagggtgccggccgctgcatccgcttccgcggcaatcatcccaaacagttcctgacttccaatggcgccattctccccagccgcctttttctgtgcttaaaacccagccgtcagcagatttgtcttcttcgctcatattaccggaatccttcccatgacccgggtcaagaacaacaatctgctttttaggcgtttgagttggcaatgcgctcgcctctgcagttggaatacttatttcatttttttcggcttcaaaagtctgtctggtaatcgttccgttcagaacaagaccaaaaactattatcaatcctgcgagaataataccgagcgctataactaagcctatcaaatattttctcataatcaatcaaaggtaagatatatctgttttgaatatccaaccgtgcctccataagatattttatagaacgtattgtttggagtgtccaggtacgtaaccttagaacccacaggtatctccataattatattagcgtctgacgcctcagacggcgtgcttcttaagtatatagcatatttcacattggttaccgtcatggtatcagaccatgctcttcctccgctgtacccggcgttgggactgacgctcgacagatattcacgcttggaatatccaatccgcccgttataattaatcttggcaaaaactgaatccgcattttcaataaatccaacctgagttcccaatggtatttcagttatgatattgctgtcgttctcctcaggcaagcttctcaaatatatagagtattttacgtttgccacatacatatatgacaccactgtggtgtttgaacttacgttatatgacggtacattctgaaccggaggcgctgcgggcgcctgagcagccggagccgctgtagccggacttattgttggagcttcagtagcgacaacggggtttatgtgatttatcggctaaggaggcgagcgtaccgtcgtagcgttttcgccagcgatagacatactgacgatttaccttatagcgaatggcagcctttgtcacgccgtgtttaaaagaatattcaattaatacttgcctaaatctcatagtttgtgttatagtgttcatatacggaaggctcctttgtgtatgtgatattatggtgatataactataacacaatttatgagttttccgtattctttttttctatttgtaacacatctattgtaatcctacaaaaatttattacaaaattcctcaaaatcccttgacagaatagaaattaactagtataattgttcgagtagaatttttttgacttctaggtgttgtataatactcggagggagggaagaaattatggcagaaataagagtaaaagaaaatgagtcgcttgatagtgcgcttcgtcgttttaagcgttcttgcgctaaggcaggtgttttatctgaggttagaaagagagaacactatgaaaagccaagcgttaaacgcaagaagaaatccgaggctgctagaaaacgcaagtattaatctgtttttctgttaatgacattccttgtcttttcatagctgtagctttgagacgatgttatataattaattgttagttaatttagaatgttaattaaattgatttatttagggctgtagtaagatagttgcaaaatattatgtgattttttatattgcaggatattttaatttgtatttattacttaagtttgcttgggttatattagtacaggagctgcaacttcaggattttatcctatcttagctgcagtcctttttatttacctttttggaggattgtatatgggtaggtttaaagataaatttaagccggatattttttgtgatgatgtatatactttagatattgaatgtttaaagaaattcggtatcaaagctcttatatttgatattgataatacattggttacatatgacgacttaaaggcgcctgaacatacaaaaaaatggtttgaaatgctgcatcaaaataatattttaacttgccttgtttcaaataataataaagagagagttgaaaattttgcaaagtcgctaaatgaaccatatttttatgctgcgcttaaaccaaagaaaaaatatataataaaagcttgtgatgtgatcggtgtttctccaaacgaagcagctttggttggtgaccaactgtttacggatatttatggaggcaatagattaggtatgtatactattatggttaaagctatctcagataaagaaaactggtttgtacattttaaacgcagtttggaaaaatattttttaaaggaatggttttgatgctggaatttaagagtgaaagttttgctcaatttggtcctgccggaaattcagatgatttttttgaagaaggaaataaatccgtttatgatgttccgaaatggctggaaaaaaatggacttagtgcgtatgaatatcaatgcggtcacggggttagaatttctgatgactctgcaaaagatctcggcgatattgcagaagggaaacacataagattatctatacatgcaccttattatataagtctatcatctgttgaggaagcaaagagagataaaagtatagaatatattttgcaaacgttaagagctgctaaatatatgagtgctgataggattgtagttcattcaggttcttgcggaaaaataactagaattgaagctcttaaacttgcttcggatactctgcgcagggctgttaaagccgctgatgagaacggatatggcaacatacgcatatgtccggaaacaatgggaaaagttaatcaattagggaatgttgaagaggttataaaattatgtcaaattgatgagagatttttacctactcttgattttggtcatataaacgctcagtctttaggtaaatataatacaaaagaaagtataaaaagtatttttgatttaatcgaaaataaattggggtatgagcgtgctaagaattttcatgcgcattattcaagaatagagtatacaagagccggcgagaagaaacatcatacaatggcagaaatcgaatatgaaccggactttgaaccgattgctgaacttattgcagagaggaactatactccaagaattatttgtgaatctgcaggaacacagacaaaagatgcgtgttcaatgcaaaaaatatataaagaattaattaataaaattgattaatatattaggaatcaggtgtttattatgaaaaatatttttgaagagcttaagttgagtaacgagactgcagttttgatatgttcaccatataatatgaaatattttagcggattttcgggcggagaaggatatgttataataacaaaagaaaataaatatctattagttgattccagatataccggaatagcaaaagaggaagcgtataaagactttttgatttttgaatttgggcttaattatccattagatgatatgttaaaaaacatacttttagaaaatcaaattaaaaatttggtttttgaagatgattttatttctgttaaagttttcaatatatttaaaaatatagcggataatattgaattttgtcctatgtctgatgatattaacaaaataagaatgataaaatcagatgaagaacttgaattaattgcaaaagctgaacagataggtgttgatgcttttaaacatattttatcttatatcaaaccaggtgtttctgaaatagatattgctgcagagcttgagtattttatgaaaaagaatggagctgaaaaaacttcttttgatacgattgttttatccggagaaagaactgctttacctcatggcgtgccgggggataggattataaaaaatggtgatttccttcttatggattacggatgtgtatataacggctattgttctgatatgacaagaacaattatgattggaaaggcagataaaaaacaaaaagaaatatataatactgtactaaatgcccaaatgacaggtttgaatgttttaaaagcaggaattggaggtttttctgctgataaagccgcaagagatgttatagacgaagcaggatatggagactattttggacattctctcggacatggggtgggacttcaaatccatgaacttccaaatttatcaccaaagtctgatattatattagaagaaaatatgatagtatcctgtgaaccgggtatatacatttacggatatggcggtgtaaggattgaagatttagtatgcgtgaaaaaagatggaattcgaaatttaacaaatttatctaaagaactaattgaaatataatttttggctccgcaatttagcggggcttttttatacacaaaattcattatcttgagtataatatttcaggagagtgatgatttcatgaatggatattacagagagtttatgccaaatgaaaaagaggataatacgcagaaacaaaaaactgctggtttacctaatgaaagtttagaaaataataatatcagaaataatgcaattaattcacaaaccaatccacggaatgtttcacagacgaatccgcaaaacaattcacaaaccaatctacggaatgttccacagaccaatccacaagcaaatccacaaaccaattcacagaccaatctacaaaccaattcacagaccaatctacaaaccaattcacagaccaatctacaaaccaatccacaaaccaatctgagaaccaatccacaaattaattcgtcaattaatccacaaactgttacacaaactagtccgcaaaataattcacaaactattccacagactatatctgaaaataatgttagaactattccggaaagtattagacaaaacaataaccagcaaacagcacaaaataatcaaaacttaaatcaggttccgaccgcaaacaataataatgttcaaaacaatagtaacttgcagaggaatgcaggttcagaggggaattataacgaacatttatcacgttttaatgaacagcttggagcgagtataaacgttaataatcaatcaaatgaaacatcaaatagacaaaattacgaaaacatagccgaatctgaagtggaatcactggaaggcggtgaaaacagtgagactattagagttccatatactggtaatgggaaactgatagtacaggttactttagcaagacaggcgatacctttggagaatgcaaaagttacagttaattcgacaaacggaagcccaatagaaataaatgaagtaagatatactggtcaaaacggaagaaccgaaccgattgatcttcctgcacctccggtttattattctaaacaaccgcaagaaaaagttcagccatatgcagtatatgacgttaagtctgaacttgacggttattacacaatagaaaatgcaaaacacgctttagtgtttgataatattgcctcaatacaaaatatagaaatgatacccaacgaagaaaacagagactaatttttggaggtgattttgtggatttggagttaaaaattccctcaactgtcgtcgttcatcttggagcgcctactgatagttcagcgcaaaatgttaccataccatttgttgattacataaaaaatgtcgcatccagcgagatattccctacttggcctgaaaatgcattaattgctaatatttatgctcagattacttttactcttaataggatatttacagagcattataggtcgcagggatatccgtttgacataacaaatttagaagcttatgatcaagcatatgtttatggtagggatttttttgaaaatataagtcaaatagttgacgaaatatttaataactacataacaagagaaggaaattataatccaatttacgctagatattgcaatggtactacatcactttgcccaggaggattatcacaatggggttcggtagatctcgctaatcaaggatatgctcctatagatatattaaaatattattatggcgatgatattacattagttgaggacgctgaggtagcggacgcaagagaatcttatcctggtcagccgttaaggcttggcgacaatagtcttgaagtaaaaggcatgcaggttagattaaatagaatttcaaaaaattacccgtcaattcccaaaatcgcatttcctgacggatattttgatgttataaccgaagatgcggttaaggattttcaaagaatatttaatctgacagcagatggaataataggaaaagcaacatggtataaaattataaggatttataatgctgtaaaaaaattgtctgaactagatgctgaaggaatttcattggcatttataaaggaacaatatacaggaacacttcgtaatggcgacacaggtcctggcgttgaaatgatacagtattatcttagatttataggaacttttaatgatttcatacccgctgtcacaacagatggtgtgttcggtgatgctaccgaaaattctgtaaggtcatttcagcaggcatatggcttggagcagacaggtgttgtaaatgaggagacatggaatagattatattcaacttatttttcgattttagacggcctgccgccggattttaaaggtgaaaattttgttcctttcggaggaacggttttataccgtggtgccagcggagatgcagtaagaactttacagaacaatctggcagaaatagcaactgtatatactgatataccaaaagttagtgtaactggatattttggccctgagacggagcaggcagttattgcgtatcaaaaattatttggtttggctcctaggggaactgtaggtccgattacttgggatagtattgccagtctttattctgatatcgtaaatggtaatctaaaatcacccggtcagtttcccggttacgttttatcagaagaataggaggatgacaatgtggtcgattaatgatgatatgagaaatatatttgaactgcaggtcatgctgagggaattaaatagaacattaggtatacgattaattaatcctgatggcatatttgatcatgaaacaactgaggcggtaacacaagtgcaaaaaatagccggtatagaaccgccaaacggtgaagtcgatcttttaacatggaacgaaatagtttctttatttcgagggtaaagtaaaattttaatttttatcttgacataattatagataaactttataatattaagttaaataaggggaattattaggagggagagatacttatgaaaaactataaagagagattcgatttcaaaacttttgttcgatgcggaatgcttactgcacttgcctgtgttttgacaatggtaccacagattcctacgggtaccggaggttatgtccatttcggagatagtataatatatgttgcctcagcatttttagggccgatttgcggagcagttgttggagcggttggacattctttggcagatatattaaccggacatataatttttgctctgcctacttttattattaagggtcttatggggtttgctataggaaaacttttatataaaaacttttcaaaaactcgttttattatgagtgcggttgcttctttggcaattgtaactctaggttattttgcagctgaaattccaatgtatggagtgtcagtagcagccatatcattaatttcgtcaccaattcaatggctgatgagtgtggtagcttcagctgttattgttcctataatcaataaatataggactaaaattggtctataactaatagagacagtgcagtttatgaattgcactgttttttctttaattaaaaagcagaagtctttggatataaaatcaagcatataatggattttaagaaaaagcggagatattatgctgtttaaaaagtaatagctgtataaatatctttgtcaagttatattagatgttaaaatcattatagaacttataataatattgaaagaaagctcataatgtaaatttttgttctataaattgtttattaaaaagatacttacagaaatattttaacagccccaaaaagttacgctaaaaatataactttttggggcaatattatttttaggaatattttcctattatctatttaataattagttctacagggcaatggtctgaaccgaaaatttcttgatggattaaagctgaatctattctgtcctttaatttttcagatactataaaataatctatacgccatccggcatttttttcacgcgctttaaatctatatgaccaccatgagtattcgccggttacatcaggatgaaggtatctaaaggtatcaatatatccttgatttaataattttgtcatctcttcgcgttcttcgtcagtaaagcctgcgttttttctatttgtttttggattttttaagtctatttcctgatgggcgacatttaaatcaccacagagaattacaggtttcattttttcaagttccgcaatatatttgcgtaactcattttcccatttaactctaaaatccaatctttttagttcctgctgcgaatttggagtatagcatgttattatataaaaatcagcaaattccgctgtaatcagtcttccttcagtgtcatattcgtcaatccccattccgtatgaaactgatatgggttgtgttttcgtaaacattgcaacgccggaatacccctttttttcagcatagttccagtattgactgtaaccctcaaggtcatcaagctgtatttgtccctcctgaagctttgtctcttgtatacagaatatatcagcgtcagcagatttgaaataatctaaaaatcctttttgcacacatgcacgtaacccgtttacattccaagaaatcaatttcattgtatgttttcctcctttgtaatgttaaaaaattttaaaccgttttgatatgttatttcacacagctgctccaactctatacctttaacttcagccattttttcagcgacgtattttacatatctgctgtcatttcgtcttcctctaaatggttcaggcgccatatacggactatctgtttcaatcattaatctttcaattggtatgacttttaaagcttcaatagcgcgttttgcatttttgaaagtgattactccagtaaaagaaatcataaaacccatattaattaaaatctttgcagtttccgcgctgcctgaaaagcagtgaatgacaccttttgtaacattcatatctttcaatactttcaatgtgtcgccttttgactgtctgtcgtgaactattattggtaaatcaagctcttttgcaatcaaaatctggttttgaaaacaattaagctgtgattcacgcggggcggagtcatcataataataatcaatgccgatctctccgattgccttaacttttggctcagtttcagcaatagttttaattttttgaaaatcttcgtcatcagcgttttctgcaaactcaggatgtataccgaccgaagcataaataaagtcatgggaattagctatattaacagcttttaatgaagtttcaaggctggacccaacctccataacagtttttacatcattttcccatatctttttaattatttcttcccggtcattatcaaattgttcatcatcgagatgtgaatgtgtgtcaaataatctcataaaatttctcctaaaaaaataatttacttgattatagcatatcgttatgttataatcaattatagcatatcgatatgttataatcaaatgaaatttaatatcttcatttattttatcaatacacagtttgttgtatataatataaataagatatttggcagaaaatggagtgatttttgtggaagaattgatagaaaaaggcaagctcgccaaatctgcgtcaagagttcttggcagtctgtccgcttcagtaaaaaataacgctttactcgctattgcagacgctttggaaaaaaattctgaatttattatatccgaaaataaaaaggatatcgatgcaggcagaagaaatggcatgaaagaaagtctaattgatagattaagtcttaatcaagccagaataatagatatggctgaaggtatacgccaaattgctggtttgccggatcctatcggtgaagctatctcaagtataaaacgtccaaacggtcttaaaatatccaaagttagggttcctctcggagtaatcggtataatatatgaagcgagaccaaacgttactgccgatgcagccgggctttgtattaaatctggaaactctgttatactccgcggaggcaaagaagcgtttaaatccaacatggcaattgtaaaagtaatgcaggattctggttataatgctggtttgccggtaggttcaattaatttggtagaaaacacaactagagaaagttcaactgagttaatgaaactgaatgattatttagatgtaattattccccgcggaggtgctgggctgataaaagcagttgttgagaatgcaacagttccgtctatagagaccgggacgggtaattgtcatgtatatgtcgattcatatgctgaccttaatatggctcatgatattgtcataaacgctaaaactcagcgtccatctgtttgcaatgctgaagaaaaattacttgtacataaagatatagcagaaaagtttttgcccaaaatgctgaagtctttaagtgataaaggtgtagaaatagttggtgatgaaaaagtttgtgagatatatccaggtgccacagaggcaacggaagaagattggggaacagagtatcttgacctaaaaataggtgttaaggtagttgacagtattgatgaagctatcaagcatatcaataattataacagcggtcactcagaggctattgttacagacagctataaaaattctcaaaaatttcttgataaaattgatgcggctgcagtttatgttaatgcttcaacaagatttactgatggattcgaatttggatttggagctgaaattggcattagtactcaaaagactcatgcccgcggtcctatgggacttaaagaattgacctcaaccaaatatataatagaaggcagcggtcagataagataattaattacaggaggtaagatatatgaggatagaaacaaaatgtatacagtcaggatataagccggaaaatggcgagccgagagttctgccgatttatcaaagcacaacgtttaaatataactcaactgagcaaatgggaagattgtttgacttggaggaaagcggatacttttataccagattggctaatccaaccaatgatgctgtcgctgctaaaatagctgacttggaaggcggagttgctgcaatgctgacctcatccggacaagcagcatgtttttattcaatatttaatatttgtgaagccggggatcactttgtttgttcttcaactgtgtatggcggaacttttaatcttttcggtgtaactatgaaaaaacttggcattgatgtcacttttgttgacccggatgcaagcgaggaagaattaaataaagcatttaagtcaaatacaaaagctatgtttggtgaaactattgcaaatcctgctttagttgttttagatattgaaaaatttgcaaaagtagctcacgaacatggagttccgcttattgttgataacacttttgcaactccaattaattgccgtccttttgagtggggagccgacatagtagtgcactcaacaacaaaatatatggacgggcacgctacctctgtaggcggagccatagttgacagcgggaattttgactgggaagcgaacagtgaaagatatcctggattgacaacacctgacgaatcatatcatggagttgtttatacagagcgattcggaaaatcagcttatatcatgaaagcaattgctactttaatgcgtgatttggggtctattcctgcgccgcaaaattcctttttgcttaatataggccttgaaactttggctttaagagtagcaaaacactgtgaaaacgcaaaaaaagttgcagagtatctaagtaaaaacgataaaatttcatgggttagtttttcaggattggagaacgataagtatcacaaacttgcacaaaagtatttgccgaacggttcatgcggagttatatctttcggaataaaaggcggtcgtgaaaacgcagtaaagtttatggatggtttaaagttagctgcaatagttacacatgtggcagatacaagaacttcagttttgcatccggcaagtcatactcatagacagatgaatgatgaagaactgaaggcggccggtgtaagtcctgatttaattagattttcagtaggtatagagaatgcagatgatataattgaggatatccagcaatcgttagataatatttaaaattttagatgtttttcagtgattcaggttggtgtttgacaaatatataagttttgcaagccataataaaccgatgattttgatatgttaaaactaagctataaataacttatatacagttatttataacttaaaatttacaaatataaatatagactataataaaaaagtaattatttaaccacattacttttcaaacagccgcttaaatgcggctgttttttgtttacttgttattgctattcttttatgtgtaatatgtactctttcatgctcatctgagccaatatgttatcttatataattgatttctaatatttatacatagtgtcattttatgactgttgagtgaaattatattgaaatcgaataggtaatttttgtaactttagttgcggcaatagcagcgtactgacaatattttaattattttgatataatgttaagagccaatcaattttaagtaatcggttggtttttttattaaacctaaatatttgtgtgttataccacgcagattgtgtatgaagcgtcgtcataattagatttttatttattttattaaaaaatatacatatgtgcatggtgtcattaaggtaatataaataaataatcaagtttgttggtcaatttttgacatgttttagtcaggttttggcaattgattgcatattaaatttgtgatataattatgacaacatattatgaaagggagtatcgatgtgaaaaattttaaaaagcttttgtcgttgtgcatagctgcaattatgatttgcggcagtatttatattcctgcactggcagattcaagtacagtagcggagtttgcaaattttaagtctgtttggaaaggcactggagaaaacaagtatttatcaattaaatctgactatttggatggaacttcaaatggtgctgttgcttatgcaggaacggcgaatttaatagaaaaaataagtgtttcgatagactgggcgcttacaagttcttatgttggcggagtatcaatatatgcgcttccgctaaaagatacaaatggtgacggaaacgccacagcggaggaaacagacgcattttacacaagaaaccttgatggtaataaaataagctcagcagaaactcccgatttggcttctgacggagttttgatagcacagctggacaattataccggagcggatggaggctggaacttttctacagtttctttgacatctcaatatcctgtgcagggtgaaaaagcaatatttttacagacctcgtgggtttccggaagcaacgggctgacgggtaattttaaaaatttggttataaaagaaagcacagagggaaatcaaattgtaagcataaccaaaaatgattttacaaaaagtgttgtctttaccaatacagaaaacggtaaaacatatgagtcaaccggtgtaacagccgcacttggagctggaacatataccgttgaagcaaagtcgtatgcgccggctacatataaagtagaggcggtaccatcggaaatcacggtaaccgataccaacggtgcaaatgtaacggtgacatcggagctgataactcaaaatttacctgaaacaaattatgaaactataaaaaataacgtaatcgaatggaacgcttcaaacggctataaacctgaatcgcttcattatataaatagtgttcagcatcagcctgatatagctgtagccggagctaagcagggtgaaaaaactgacgctgatgtatatatgcttgtcaacacacaaaccggtaaatttcatacatacggaagaaatggagcaatgcagattaacggcggctccggagatggcgctgtgggtactgtattgaaagttcctgtagttaaggatactaaggtgacgcttgatgcttcttcatttacttatactgtgaatggacaaagtttcagcggtactcaggattattattatctcggcaatgataatggctatgcggtaataaatgttataagcggcggttatgcatcctccgttacaacaacaccgcttactagaacagcagttaccggaactgtaacgggaacggacgccggatgtataatgtttaatgatatttcatcaggcgatgtacagtatgctgagattttaggtggttcatattctgcggagttactaagcggacaatcttatgtgataaaatttggaacatatgaaaatggtgttttcaaagtatctgaaacaaactctacagatattggaggaataatcccgtcgggaaccagtcaggttcaaaatatagccataacagaattaaaggattatattatcggcggtgatgttgttgatttaaaagacggcgacatattaaagcttaacgatggaacaaaagattatgaaattactgtttcgaatggtaaatggagtgcgtccgttccgaacggagtgtatactttcacaattaaatcagataaaaacggaacgctgtcgacgctttcaaaaaacagttttacagtacttggtgataataataaaataaaaaatgttttagttgtatatcctgttcagccggaaacaaaaaaatatataactgttggaacgaattgtgattacgcaacgcttaatgacgctcttgacgctgtaaaggcaaatggcaacccagcttctgaagctgaacgtgttactatttatttaaagggcggagaaactttcagggaacaggttatacttactacgccgtacattacattgacaagcgacaaggataatccggcaacagtcacatggtactatgcttcatatcatagatattacagtgttggtcctacaggcgagtatgataaggactatgcggttgcaaaatctgttaaaaatgatattcaaaacgattggggtgcggcttttaaaataaaagaaactgcgacagattttaaagcagaaaatattaaatttataaattcatttaatgtggaatatactgacgaagagcgagcagacggtgttgaagatacaggaggcggttatgacagaatgctgacgccaaatgacgccggttataaacctgccgattcaagaagcgtgcagactacagccgttgctgtttttgcggcagctgataagagtgagttcaataattgtgtaattatatcaaatcaggacacattgtttacaggcggacctgttagactatattttaacaaatgcgcaataagcggaaacgtcgactatatttttggcggcggttggtgtgtgtttgaaaagtgtgatttggtctcagccggttacagcgaccaaaacggaggcggatatataaccgctaacggtgcgaaaggaaataacggctattatttgtttagagactgtacagttaaaaattcggatgttaaaggaagaaaatttggttcaatcgcgtggggacgtaattggggcggagacacaagtgaagtctatcttataaacactaaagttgacaaaggagtaacaaggccgtcaggctggggcggctggggaacagtatcaaacgcgccattgtatgtctttgatttaaacgacccgtcagtcggtaaaaatacaacagataatatgcatggcttcctgacccaggaacaagctgaacaaaaatattacagcgtacttagtatgatgaatggttgggatcctatatatttaaatcgtgcaaaaggtattacgatcagtgatgcttcggttgaattgaacgtaagtgcagaaaaacagcttgcagcttccgtaaatccatcagatgctatagatacaagaataatatggagcagttcaaagagtgacattgcttctgtggataattccggaaaggttattgctctttcacctggtgatacaattattaccgcaaaaactgttgatggtggattctcagcaacatgtaatgtaaaggttttggcttcaacagacccgtctgcaagtccaacgatagagcctacgtctgaaccgtctgcaagtccgacgcctgagcctttgaaattcagtatagaatatacaaaagatggtcaggcgcatgtaatatcaccggaagccggtactttctctgtcattttcgcagcatataataatgatattttgacaagtacagagtttataccagtgacatttacagagcccggagaacatgttgtgacaccattaaatttcagtacagtcggtgcagacagtgtaaaggttatgctgtggagttcaacagatactatgagaccgttatgtgcggcggatatcagtaaataaagacagcagaaaataaaaaattaagcggcagatgattatcatctgccgccggctattatttaatatattgaatacctgcgtatcatcttacggtattgggatggagaaacgccatatatatctttaaagattctgtagaatgagcgtgtagattcaaagcctgaatctgtggctatatcttcaagattgtcatctgatatttttataagcgaggcggcatggtttgtgcgtagaacatttagataggttctgaaactgacctttatttgatttgaaaaaactcttgatatataatatttgtttattcccaactcgtcggaaatcatatcaagcgtcaaactctttcggaaattcaatgaaatatatgagagcagacgagtaatagtgtctgaattttgtaatgaaagaagtgtgtttttcatcaggagaggaattgtatggctgaagataatatacgcccaacctatttgtgcgtttatactcgcttcctcaaaaattttatgaaaagcgagtaccgcattttcatttaatatatcagcattgataatacattcatcgggatatgagccgcgcgtgtcgggaaacattgcatacagtgcgtcagcaggcataaatattattgcgctgtcggcagcattattaactttttttatggaatccggacgtgtgtatgagtgaggaacatttggaaaaattacagcacagtcgccttcgtaaagaacatattcggagccgtttacaatgagtccctgttctccttcgaacagaaatatagtttcaaattcgttatgcagatggcttttatatttgagcgcccggtgatgatgaacaacgtcgagttcatattgatgtacctcataaaaattaaacatatattatcttccctttattttattatcttctaatatatttattataacatgcggatatattttccgtcaatctataagtcaattattggcagttaatacagcaatactgtcaactgaccgatacattgctttggtatataatgctagcataatcgcagtttattgaaaaaacagatttatatatatatcaactgaaagtgtatataggtttgaataacaatatcgatttatagggtaagcaggtatggattgtagtaatgatttaatatacttatttatggatttatgtatgagatgtcagctattgacaaattgttaatatgtgttttgattcgaggttttggatataaatacataagttgttaaaatgaaatagaaaataatgcttctcattttaataactaatgtattaatatgcttatactcattgttagaagtctgcagtttacagagaatgactgccgtttatgaatatactttgaggcgatgtcattatttcttataattgcagaaaaatttacattgagataaataaaattttgagaaataataaataattatagatttcttcccaaaaaagctgcctgagaaattatttctcaggcgctctgttttattgtaaaattaattattatattagtagtttgtacaaacaatgaagtaattaaaacaaataagtcaatatataatttctatttttatgtatttatattttattgttcagttattagaactttgttatttattatatattttaattggtggataataattggtaataaatctattattgactcaatagatatgagagtgttgaattttaataatcgaattattatccatatctgttttaattctataaaaattaacattgataaaaagaggatttaaaaagtataaacagaattataataatgataagttagtggattatatgaaatattttaaagttttaatggttgtatagatatatgttaatagaattgaattttatatataattaatatttcaatataaaacttatattgaaatatttaggcaaataaaaataagtttaagtagaggaagccgttttaactgtaaatttaagtaaaaatacgagcaaaagtgcagctggcctagttttgttttgtattataaaagaacttgtacatcatggttctatttataaaacaatgaaaaagaatataaaaataaaatactttaataattatgaagactatttaaagaattattcccaatttagaagttgcgggataagaaaatagaaaaatagaagataattaatatagtatccttgtagattcccgagtgaagctatgatattttctgattttctgtgccattactatatatattatcggaaacagcgttctttatgctgatttttgggtagcagtataaatttatttgtttaaaagaacagtgataatttctagaaaaatgctactttaactcaaaatactaattgttttataaaatagagtaattgttttggaggcggtaatatttagaaattattatagcagtgatataactatatataaattagatataatatcatttcaaaaacaatgtatattcaaaaataattatagtcttgcagagcagcaaaaaacaaaatttaattcaaaattactgctttttagagagggagtgtggggatggaatatttcaaagttctactgcctgtaattgttgcagctatatcttctgtaattgtaattttagttattattaaaaagcataagaagaatggcaaaattgaaaattatatgaatgagggattaacaataggcttatgtttgggcgccggaattggagcaagcttcttaactaatattacatattttatcagtataggtatgctggtgggatttttggttggtataaatataaaaaaacattagaaatgtttagtaacattaaaaaagaatgaattatttattaccgtcagtattaaaatactgacggtattttgtatttaaaatttttggttatacagacttaaaatatttaaaaagttttagttaattaaatatatttaaattagacaaaagtgatattgaatattattaatagtttaataaatatataaagtatcttgattttttttgatatattatttataatagtaatgtaaaactaatcataaaagttaatttgtgttttattattttaacagcaaaaattttgtagtagaatctatggatactatgaattaaacatatgcaggagctgaaatttatgtgaagatggttattaatatgatgttacttatattaaaaataagaagggattttaattatgaaattaggcagattaaaagaagttaatgtcagggatttatggcatcacgaacagtatgatttttctaattggttatctgaagaagaaaatatagaacttttaaatgatattctaggattgactttaatagatattaataaagaagtatatgttggggcatatagatgtgatttagttgccagagatgaagcaacaggtataaatataataatagaaaatcaacttgaatgttcaaaccatgatcatttaggtaagataataacatatgcgtcaggtcttgatgctcaagtgattgtatggatagttgaagaagcgcgtgaggaacatagaagtgcaatagagtggttgaataataataccaataaaaaattaaatttctttttaattgaacttcatgcatataaaattggcgattcgataccagctccaaaattcgaaattattgaaaagccaaatgattttattaagaattcaaaaggaaacagtgattcaaatgatatgagtaaaactcagtccgagagagtaatattttggacaatgtttaatgagcttgtagttaacaggggcaaaccttttaatatcagaaaagtgtcgacagataattggtataatgttgcaattggaacaagtgaagcacatatatgtattaatcttgtcaataaagaatccagcattgtcatagaattatatattaataacaataaagaactatttgataaattatatggtaataaaactgagattgaaagtgagcttggattatctttagattggcaaaggttgaataatagaaaagcttcaagaattaaatacttaatatatggattaaattttgataaccacgaaaattattctgaattaatgaatgagataattgataaggttattttaatgaggaaagtctttattaaatatatttagtttttatatattatttttatttgatatttgagaaatgaattagattattaaaataaaaaacagtaatctttaaagagtcaacatgagcaattttacgtcagtacatagttgtcggagtttttaacagattttattgcatatccattgcatttcatatttattcatggtataattttagtaaatatatactattggggtgagagtatgaataaaaaaatatgcaaactaacaatgcttttattcgtgacggtgattttggtatgttcggcttctgttgtatttgctgagggtattattaatcaaaattgttcagtgtttttttctgtaaacggcggtttgtatcagaaacctttttctttaacactttctactgatcttgaaaatgcacaaatatattatacgactgacggaagcgacccaaccgaaaattcagttctttacaatggaaacatcactatagagaaccgtacttcacagcccaatgatttatctgaaatttccggtgtttcaaccagttttaaagcgccaaacggtctagtttttaaaggaaccgttataaaggccagagctgtaaacgccgaatctacaactcctatattcgtaaactcttattttgttagtgacgatattttgactagatatggagtaaaagttatttctattactactaaacgtgataatttgttttcaaagcaaaatggaatatatatgtcgcccaattatttagaatcaggagaactttatgagcggagcgcttttgttgaagtgtttgattctgacggaagttgtcaaatagcccagccggcgggtatccgtattcatggcggcgcgtcacgaaattatcagcaaaaatcgtttcgtgtttatgcccgtgagaatccggaatatcagagcggcggtctgaaaacttttgaaggagatttatttgatggaactgttactgattttaagggtggtataataacaaagtataagcgtcttatgctaagaaacggcggaaatgattgggataagaaatttatccaggatgcgtttatccaggatatatgtgctcctcttgattttgatacacagggttatcgtccgtctgttgcatttattaacggtgaattttggggtatgtatgatttgcgtgagcggtatgatgaccaatattttagatatcactataagttgaatgacaataaagatgttgctatgctaaaaatgtcatctgaagacggtgttcgtgatattctcacgctagaagagggagaagaacaatatcttaatgagtatcttgagcattataattggattttggaaaacaatcttaaggttccggataattatgagactgcttgtaaatactttgatccgtccaatatgattgactatgtgattgcaaatgtgtattttaaaaattgggattggcctcagaacaatgtggtaatttggaaaaataccaatccacaaaatgattttgacgaccgctggcggtttgctatgcttgataacgactacactcttgaggcaaacggaaagctaaatactgataatatccttgaaaaccgaatatatggcaaagaccaaccgtcagcttcagctaaggggtggaagcttagtcagctgtttgcggcatttttggaaaacgatgattttagaaatgagacaattaggcgttataatgactatatgaacactatttttgataatgatatattatcgtcaagattggatgaaatgtataataatatttcacatttggttgccgagcaaaaaagcagatacccgcttagcatgaaaaatgacaatcgcagcagtataaaatctcaaatcaatttaagggaaaccgccgcaagaaatgagataaaagaaacatggggcgtacatgaaatggtgaacgcgttatttatctcggatttatcaaaaggatatataaaggtaaataatattgaactttgttccaataacaaatggcagattaaaaatccgggaaactattccgcacaatattataagaatatcccgatacaaattaatgcagtggcagagaatggatataaatttagttattttttaataaatggacaaaaggtatatgacagctgcgttaacttagatatgtcggttgatgagactgttgagaccatttttgaaaggaccgaaacggcaaaattgatttcagattcaatagtgatttatcaagttttcggagatgggggcaaaactgacgcaattatggatagaagctgcgtacagctgtataatcctctagatgttccggtagatatttcagggtatgctttgcagtattcatcgtcagttggagatggatggcaaaaatttgttatgcctgaaaactctgttataaaaccgaaacatttttatttgattggaggtaagttaaactccataaatgccaggataaagattgacgctgatatttattttgatgatatggttatagataacaagatgttcaaattggcgcttacaaaaaattctgaggatattaacgccaaagcaacaacagttgcggttatagatttgcttggtgtggtggagaagaatggagattcgtcaattgacgcttatgagactgtgccttcatatggtttatcaaagcagaagtctttaatcaggataggttctgataccggaaataatcaggaagattttgcagttttttcatttaaagacgcgtcagacgaggaggtcaaagaaaaacagccgcataagcatgattatattgaatccccaagcccatcaccaatacataccgacaaaccgacaccgctgccgaatgtttcttatactgatacagaaattaagctggaaaacggagaatattggcttagtaccaagctcacaaatattgaacccggttcctcagtggttgtagcggcttatgataataaaggtgtgttaatttcaatacagatagtaaaaagtacagattcaaatattaatactcaatttacatcaaatactaatatagatttttttaaagtatttgtatttgaagagatggatgatattgttcctgtaacagattctgagttagtagaaatataatatctataattaaccaagtacaagagcctggttttatatttggtgtagatgtgtataaagtttaggtttgcaatatattactataagtatagagtcggttagattgattttacagatacagaaaatagttatatttatttctgataatatttgacggattaaattatgttataattaagaaccacataaagtgatataaaaactttgtgtggtttttgaaatttttatttcgggtataaatttaactatttaaaaataaatggagttagtggtaaaaatttagattattattatcaatgttaaaaatattaacttagaggatatattttatctgtatatggctttgtgccatagtatgatgtaattttaatatagacaaaagacttttgtatgaaaagagagaacaaaaaatttctaaatataatataatttctatataaataaatatttgttaattgattatttaaatttttagaataaataaactggtactataaaaattgttttaactggctctgttaaatttacaaaatgtgatttagaatatagtagtgtacagagatataattataaatttgtattcaaaaagtgttataagatataacaagttatttcttaatacataataggaaacaataaatttttatttgtaatatttaatcttatggaaaacatctttaaactatatatttgggacggcgcagatgtaattatccctctaagtcgagccaaaggtgaaattaatgcaatttctgttcctttggctccgacatctgagccggaaatagaatttttaatattaggatttattttcaaagatattaaactatataaattattgtgtgaataacacaaaatgcagtaattttaaaaggttattattttgtaaagaataaaaagctgtcgattttaatcgacagcttttaataaatggtgcgactgtccttattggacttatggaaaaatcgcataaacacaagggttttgagcggtcaataaacagtattaaccttaaaataaaataattttatgtttaaaaaatatcgtgaattgcatatttacggtattttttatttcccttttgcaccaaagaccgacctttacattctcagatagtatatcataaatacataaggcggtcaattaaaaaacaaaagaacgacaaaatttttattttgccgaagtaaaacagaatattttatatataaggcattgggaacactcaatgtctttttttgatgtcgatatttaggaaaggagcatatcagctatggcaacagtattcagagttcagaaaacaaaagattttacagtgatgtctaatcatcatttaaaaaataaagatttgtccctgcggtcaaaagggcttttatcgtttatgcttagcttgcctgaagattgggattattcccttaaaggcttagcaactttaaataaagagggcattgacgccatacgctcggcaatcaatgagcttgaagcgtttggatatattgagcgttcccgcgtcagaaacgaaaaagggcagcttggcgaaaatgaatatatcatacacgaattgcctatatcgcccgaaccaaaacagaccgagcctacattggaaaatccaacattggataatcctgtacaggctgaacctgaacagggcaagtccacgcaattaaatactaataaatcaaatactgaaatatcaaatactgatttattaaatacttatccaatcaattctacggagccggaggaaaacggcgaacctgtaaaaccacaacagcctgaacggataggaatggataagattttagcatacagacagcttataaaacaaaatattgagtatgatattttatgtcaaaagctaaacggcaatatcggtattctgaatgaaattgttgatattatcactgaaacggtatgtacaacaagagaatacttaaccgttgcaagcgaggaacgaaatgcggaaacggtaaaatccaaacttctgaaactaaacagcgagcatatcgaatatgtcatagactgtatgaagaataacacaacagacgtacacgatacaagaaaatatttacttgcggcgttattcaatgccccctccactattgacagctattacaccttgaaagtaaatcacgatatgtacggaggtaattaaaattacatacaacccaaaatcacgcgccccgcctatgcgagcgtgttttttaatacaaaattttaaatcttgacaaggaggatttttagaaatgagaaacaaaataaaaagaattttagccgctgtaatggcggcgggaatgactttgagcgttattccctcaatcaccacttatgcggcgcagagtaacgaatatgtcgatccggcggacgtatggattgaagcaaacgggcgcacaagcgagtttgacatcaatgcaacagtaactacgggtacaatgttctgccccgtctgcgatatgccgacaagcaacatttcctaccgcgtacccgaatacacacgaactggcgaaaccgcatataatcgcggcgtctactattcggacggtacgcttattgacggaaaaggcaaaggcaatcttgacgacggaacacccggcgttgacgcgttctatacggggtatcattggacaaaatcagtttgtcagaattgcggtacggtaaattccgttgacggaattaacgcgtattcgtgcggtaaagatgtatattcccttaacccctgcgacagcaactttttcttggattttgacagtacggaatacataccgtacaacagcaggacgcatacggtaaaagcaaaaaagggcaagtattgtcaattctgcaaaggcacgaaagagcgggtgcaggacaaacaggaaaaccacaacttcaccgaaaatgtaaacggcgaattgggaaatcagcgttttcacattacagcggattgtgaggactgcggatataagaaaaacgaatacgcggcggcaaagtctgttgtacaaagctattatggcaaggttgacggaaaacctcataccgtaaccgtcaatgacttatcggagaatggcgtaaatacaagtattcgttacggaacggaagcgaaaaagtgtaacaagacaagcgcgccgaattataccgacgagggctattatcccgtatattatgagatagaatatacctacggcggcgagagtatgacggaaaacggcgtaagctatgtatggcttttaagcgataatccgccctcaaatacaaacagtattcatactcacgatttcagatttttggaaacagtgcgccccacttgtacagagttaggttttgaccgtttccagtgtgccgagtgcggagccttgcagaaaacgaattatactcccgcaagcgggcacgattacaatactgttgtaattcgtgagccgagttgtcagcaaggcggtttagaattacattcctgtacaaagtgcggcagctattatacagaaagtacctcaatgacgggacaccgttatgaaacaaatattgttgcctccacttgtacaaagaacggatatacagaacatatttgtatcgactgcggatataagtacattacggatttaacgccacttgcaaaacacgattacagaccgacagtaaccgcgcccacttgtaaaacaaaaggctttaccacatacaagtgcagaaattgtgatgatacctatgtcggcgattacaccgagccgcgcggtcataaatgggacgagggacacactgtaactaattcgacctgcgagagcgagggcgttatggaataccactgtaaacattgtgatgaaaagatgatacaggcaatttcagcgacaggacatacacccggaaaggctgctacctgtaccgaaccgcaaaagtgcgaaagctgcggcgctattcttgaactgccgacaggacacacctattccgaaacagtaacggagccgacttgtacagctatgggatttaccacatataattgtgagaattgcgaccattcatatatcggtaattatacggataagaccgaacacaagtataattcagttgtaactcccccgacctgtacggaaatgggatatacaacatatacttgcgaggattgcggcgacagctacatttcagattatacggataaaacagagcataaatataatgctgttgtaacttccccgacttgtacggaaatgggatatacaacatatacttgcgaggattgcggcgacagctataaatctgattatacggaggttcttcctcataattacaataagcagacgattaagcctacttgcacatcacagggctatacaatttacacttgccccgattgcggcaaggaatatatcggcgacgagcaggagccgacagagcataaatatattcccactgtaaccgcgccgacttgtacggaaatgggatatacaacttttacttgcgaggattgcggaaaatcgtatgtcgcggattacacggacgcgaaaggccataactatgaggaaaaaatcacaacttccacttgtacgggtataggatatacaacctttacttgtaaggactgcggaatttcatatatcggaaacgagcaggcaaagaccgctcacgattacgaaacaacagtaaccgcgcctacctgtacagaattgggctatacaacatacacctgtaaaaactgcggcgaaacatatagagccgacgaggtatcggcaaaaggacacaagatgtcagattggattattgacgttcccgctacgattgagaatgagggcagcaggcatattgaatgtacggattgcggtacagttttaaaaattgaggaaatcccccagcttaccgataaggacaattcggacgaggacggatattcaaaagtcggtgattatagtattctgattaccgataaggacagcaagcctgttttcaattcagaaatcagcattgacaaggacgataacatcacaattaagctgccggagggcagattgcttgactatgaggacagaacgacaattacggttgttcgtacagatacaaaggcagcggcagagggcttgaatatcaatatttcagacaagagcggcaacgccgcaacaggtcagacggacgcaggcggtcagcttattgttccgaataatcagagctcaacgggtaatgaaaacggcactatcggcggcgataacggcgaaacaaaatatacttatgttgttaccgttacagacaaaaacgataccgtcattcccgattgtgaaattcacataggcgataaccacgatattgtcgtaaaacttcccgacggtacggctatgaacagcgacaaccgcgttactgttacggtcaaagaccagaacggcgaagcaaaggaaaatgtaaacgtgattgtcataggcgacagcgactatatagaaaagggcgttacaaacgcaaacggtcaggctacattaccgaataaaaatcaggcgtacacggacaaaaacggtacggcgaatgtaaacggatatatcgtacttgtcgaagatgaaacggaaccggtatatatggcgcttgtaaccgttgacgataacggcgttatggtatgcctccccgacggtaaaaagattgattaccataaccgtacatctgtaattgtaaagacgaatgacggaaaagcggttgagggcgtaagcgtaaatgtctatgacaatgcaggcggcgacagaaccgagataacagacaaggacggaaaaatcactgttcctccgctgaatgaaaatataatcgagaataaaccgacgccggagcctactctgacaacaaaacccggacttgaaactcccgaaccgtcagagaagccggacgcaacagacgaaccgagcgcaacggataaaccgtcagaaacagaaaagccggacgcgacagagcagccgagcgaaacggaaaagccgaagcctaccgtaaatcccgataatggaagcgaggttgttactcccgattattcgtataaggtatctgtaaatgacaatgacggcgctgtaaacggcgcaatcgtcagtgttgataaagacaacggcagcgttacggttaagctccctgatgaaaagggtatcactcccgataacagaattattatcggaattacagacaaggacggaaaagctgtaaacggcgtacctgttaccgtaattgcaaaggacggaacggaagcaaaagaccttacaaacagtgagggcattgcgattgttcccccgacaagtacagaccgtacagacaaaaacggctatgcacaggttgttgagggagaaaagacatacaatgtcattgtcgaggacacaaaggcaaaaatcgaaaatgccgccgttgaggttaaggacggtaaaatcagcgttattcttcccgacggaaacaagctcaatacagataatcaaaccactgtaaccgtcagcggcaaggataatacagcggtcaaggatatttccgtaactgttaccgataaggataataagacagcgacaaaatcaaccgacgcaaacggtaaaatcactgtacccgtcaagacttcaacaggcggtggcggcggttcttcttcaggaggaagcggcggcagtagcggatatgtcaagccgtcatacactgtaaaggttgtcgataaggacggaaagaccgtcaatgtcaataagaccgtcaaggacgataaaatcactttgacgcttccgagcggcaaaactcttgacgataattattatacaattaccgtaacggataacaagggcaagacaacggcgggtattgatgttacgctcaaagacaagaataattccgtcagcggcgcaaccgacgcaaacggtcagcttattatgccgacaaacacgcataattcttatgtagtcggatatgaggacggagcctttaagcctgaaaataatatgacaagagcagaagcagctgccatattcgcccgtaatattgcagagcgtaagggcgaaaatatttcaagccgtaaatcatcatttaaggacgtatcaagcaaggattggtttaataactatatcgcctatcttgaaaagtacaaggtaatatccggctatgacgataagacatttaagccggacgaacatattacaagagccgaatttgtaacaatgtgtatgaggttctatgcgctggacgctaagacagtggcggcaaagaagaatatttttaatgatgtaccaaaatcacattgggcgtcaggttatatttacagcgctgttggtatgggctggataaacggatacagcgacagcacatttaagccggacagcaacatcacacgcgcggaggttgtaacgattgtaaaccgcgtaacaggacgcgccgccgatacggaatacatcaataagaatatgtcagccgtaaataaatttacagacctcaaagacaagtcatattgggcgttttatgaaatccttgaagcaagcaatacgcataataccgttgacggaaagagcggcgaaacttgggtaaaataattgtctgatttgtgtattgtgtttgttgaccggatatgatataatctttataatattttatatcgaaaggaaagaatattatggataaaaaattaaaaataattatagaaaactgtccccaaaatcataaatgccccgctgtcaatgtttgtcctgttggagcgttaagtcagaaagattttgaagcaccgataatagattatgacaagtgtatagggtgcggtaaatgttcaaatttctgtcctaaaaaagcattggtattataattggattatacataaggggtgtaaacggtggaggaacgcatagaaccgacaaatacggtacagactgaatttgacgagtggattataaacggtttggataaggcggaagaaataatccataaatcagatacagagaatattaagcaataagcggttgtttgaaaataaacagccgcttttttgttgcaaggagtgatgtctatacaggaagaaataaataaaaaaacagttgcgttagttataagcgcttccaaaatgacggggcgcgtattgcaggcggcaattcgtgaatacctaagacagcagcagaaaaataaaaacaagggctatcagggtaaacagacgattaagcagcttgtagagtcaggcgcggcgctttcaaatattgagataacgaataaaaatataaaatcttttgagccggtggcgaaaaagtacggacttgactatgctttgaaaaaggataattccacgaaaccgccgaagtacctcgtattcttcaagggtaaggatattgatgtcataaatatggcgtttcaggagtattcgcaaaagctgttacgggaaaaaccgtcaatccgtaaaatgttatctcaaatgcgcgagcttgcaaagactatcaatccgaaagaccgcgcccgccgcaaagaacaggagcgcgatatatgaggatagacaaaaggtttattcttttaaatatcccgtatcttctgttcttttggattgctgataagatatgctatatatacaggataacagagggtaataaaataatagcgttggttcagggaattgcggagttttacaaagctccgctttttttgttccacataatcgatatatcaatcggagtaatagccgcgcttctgattaagtgcgcagtttatgtcaggggtaaaaatgctaagaaataccgaaacggcattgaatacggttcggcgcgctggggtacggcgtcagacatagccccgtatattgacggacagaatttctataataatgttcttctcacgaatacggaacggcttacaatggacagccgcccgaagctgccgaagtacgcaagaaataagaatgttcttgtaatcggcggcagcggcagcggtaagacaaggtttttcataaaaccgaatttaatgcaaatgcacagcagctatgttgtaaccgatccgaaaggtacggttttaattgagtgcgggaagctgttacaaaaaggcggatatatcataaaaacatttaatacgataaatttcaaaaagagtatgaaatataatccgtttgagtacatacgcagcgaaaaggatattttgaagctcgttaatacccttattgcgaataccaaaggcgagggcgaaaagtcaagtgaggatttctgggttaaggctgaacgcctgtattattgcgccctcataggctatatttggtacgaagcgcccgacgaggaaaagaacatcataactcttttggatatgataaacgcgtcggaagcaaaagaggacgacgagaattataaaagccccgttgatttactctttgaccgtctggaagaaaaggaaccggagcatttcgcagtaaagcagtataagaaatacaaaatggcagccggcaagactgctaaaagtattttgatttcgtgcggcgcgagattagcgccgtttgacagtgcagcgacacgttgtcgcatataaactctgcgtgggattttcctgcaaagaggtaaaagtgacggaaaggctatagcctttctaactgatattccgagaagtggaatggcggggtaacgccctgaaacgcttcccttgatactgcgttggaagaaacgggacgtatttcccgcgactgacacagcacgctgaagtcggctgtctgcacccgcgactgtcccctttgggggataaagcaaagccgagccagaggtggccgggggtgttaggccggaggtctataaagtacctatgtccagaatgcggctgactaccgctgacaaaagcccgaatgtacaggtctataacgggatatggcagaaatgccatagccgtgaaaacggcgtatgtggggtaaagtaagatttgtcgatatgaaattccctatggtgttacaggcaccatcaggcatacaggcctaaagggcagggttaagggtattatgcaaagataggaatatcggaacgtggaaagccccggatgtggagtggatacgcatgatgaagcaatgggcgggaaaatcgtgccgccttttatgggaggtgcggtataaccgttcttaatccgggaggaaagagcagccatgctacctgtgaagccgtgaacaaagtaagcggtggagggacgggctgtagtcaggaacagaaacaaaatcatattcaataaacacgcataggttcgagtaggactaagaaaggcgaaaatccaaacgaaagtggggataagtaaccgactatggcaacaggaaaggcaaagaagaaagataagttaaggcacgccgagtattatgacttccaggcaattcaagataagctgtatgccgacagcaataaaggcaaagttttcaaacatctggttgaaatcattgcattacccgaaaacatacggctggcataccgcaacatcaagaagaaccacgggagtacgacgcccggcacagatggaaaaacaatcacagaattatcagcactctctgatgaacagcttatatgcgccatacagcgcaaattaaactggtatgtcccacaaagcgtccggcgggtagaaattccgaaaggaaatgacccaatgaagaagcgcccgctcggaataccgacgattatggacaggctgatacaacagtgcgtattgcaggtcatggagccgatatgtgaggcgaaattccacgaccacagttatggattccgccctaaccgaaaccaacagcacgcaatcgcccaggttcacaaaaatatgcagagaagcaatctccactatgtcgtagacatagatgttaaggggttctttgacaacgtgaaccacggaaaactgctgaaacagctctggacaatgggaatccaagacaagaagctgcttagtattatatcagctatgctaaaagcggaggtggccgggataggattcccggaggtgggtacgccgcagggaggtattatctctcccctgctatccaatgtagttctaaacgaattggattggtggcttgccagccaatgggaagaaataccaacggagttcccttacaaggaatcggtcaattacaacggaagcgtgagcaagagccataaatttgccgcactgcggaggacaaggctgaaagaagtcacctgcgtccgatacgctgatgattttaagatattcacgaacagctatcaaaatgcggtgaagttattccacgcaaccaaaagctggctccatgaaaggctttctcttgaaatcagtcctgaaaaatcgaaggtgattaacctgaaagagcagtattcagagtttcttggtttcaagttaaaggttatcccccgtgggaaacggagcaacggacgcgccaaatatgtagtagagagccatatcagagagaaatctattgcgaaaataaaaccaaacttaaaacggctgatttacgacattgagttcccgtcacaaggcaaacgtactgaatatcaggcgatttgccgctacaacgtttatgtaatgggaatccatgactactatcaattagccacaaaggtctgcgatgaccttacgccattcgccttatctgtccacaagagcctgcgggcaagactgaaagaacgggttaaaactgcaaaacaggtcagaaaaaggaagattccgtgtgaagttccgaaagttatcagggaacggtatgggaaaagcaaacagctccgatatgtagccggacacgcagttgtcccgattggctacatacggcacaagcccccaaagtccatgaaccgcaaaatcaattcctatatgcccgagggcagagccgaaatccataagaatctggacagaatcgacatgacggttcttcattacttaatgaggaacccggttctgtaccgtactatcgaatacaacgataacaggctttcactgtattcggcccaaatgggaaaatgcgccgtatctggcaaagtgctttctattggcgatattcattgccatcacaaagtgccacggtatttaggcggcaaggacaattatcaaaatctggtgttggtatgtgaagatgtacatcacctgattcatgctacaaaccctgatattatcagaaagtatatggaaatcctaggccttgaccaaaagcagaaagaaaaactcaataagttaagaagccttgtccacgttgagagttattgagatgaaataaattctgttcctgatggcaagccgggtgagctgaaaggttcatgcccggtttagggcgggggaaaatccggagataacatcaaaggattacctatcgctattacacctgtacccataccgaacacagaagttaagcttctcagcgctgaaaatacttggcgggtgactgcccgggaacataagacgctgccaaaacatatcagagcacttgaacgaaagttcaggtgctttttttatgctcgaacaaataatatattggattgctgtctctgcatctgaatgatgtgtgttatgagataccaataaattgttaagctgtgatggatagtgaccgcacttaaaaaagtgtgtatagtgtgtataatgaaactagcttgttatatcaaacctgcaatatcaattgtggctgtacttttgtttaatttatgatggaattaaatcatatatttatgaacggttttaaaatatgtatttgtatgaagtatgatatgtgcgaaatatttgtataacttttgtgagacatatgttatgatatttgtatattgaacactgcgtgtacaggtaatagctcacctaacgcggcgcataaatgcgccctaccgatgttcgcaaacacactttttttactctattatttatatatattgattagctttattttggttttaagtaatatagaattttattactatataatatacttttgtttattcaggtaacaagaaactaatattaataccaaaatcattaatattaaaagctgtgttatagtgaacatcggcagggcaaacgcaggttgccgcgttaggtgaaccatcatctgaacacgcagtgttcaatatacaaatatcacaacttatatgacacaaatgttatacaaatatagcatatatattatacttaataaaaatatcataacctatatgaaataatttgtatatttaaattatttttattagtgtagtttaatatataattagttatcccttatatagaatagcgggtttataaggtggaatatatatcatgtaaaactcatttgttttatgaatatatgctttattttatttcttaaaataattagtttagtttgcattcttcttatataaatcatataaaaaagatgtttattttattatatcattattcagacagagattttacttttataaattattgaaaaataaaaaatgtttattattttttatttttttgcttcattctatatattaaaaacgaatgaatattatttgaatatatactcaattctattaatttgtactggacctataaaaatattcttaatctggacctaaaaatatttacttgtttggtatataataaaataaaaaatattgttgggaggaaagaaaatgtttaagagattaggagctttagttatgtctgttatgatgttaggcagttcgatggctgccgcggcagctgctgatgtcaaccttgaaggatatccttctcaaaaaggatatgacccggaaactgtaatgtggactgataatccaattgaaaatgtattggcggagaccggaatttacggtaatgctgccgaagttaatccaaatgcagattcaaaaagtaatgtgagtatgcagaatccttatgcagctaatggcgataagtttacgggctgggcatattctgaattctgctggacaaattcgtatccgataggaaacggtcgcatggcgggtatggttgcaggaggaattgataaagaagttattcaaatcaacgaagatacttgttgggatgggtcaccgtatggaactctaaaagatgaaaacggaaacacacttacgaaaatttctcagactgccaatgcagaaaaaataagcgttgagaatccaaccagcggaagtatcaaggatgactggaagtatttccgcggtgcaaatgcggatggtactccggcggagatcggttcagctgatgcaatcgttggtgatgagacttttagaacaaagttccccgattttgctaataaaagtatttcatatcagtcactgaatatagataattcaaaagagcaacaggctgttcaggacagatggagtatggaaagaatggttgaggagactttcttaggaagtccaaacagacaaagagcatataaatcatttgttgaggtttatcttgattttggacagcaccatgaacaggctgaaaattatgttaagcgtcttgacatgaagacaggcgtagttactgttgagtatgattatcacggtgagcattataaacgtgaatcttttgcaagttaccctgaccaggttgttgcaactcatgttgagtcaactgaagaattaaatttcttagctgagttacatacatatcataatcaaaaaactgattactataagtatgaaaaaatcagtgacaatgaagttaaattgactgcttctgtttataatggaagcaaagacgacaatgaaccaggaactgtaaacgcaatcagatttgaagctcacatgtttttagacggagataaggacacaaggtttgcagttgcaaaagataatacttccgtttcagtagtggggggaaacagcgccgatatatatgttgtcggagctacaaattatgttgattatttaaatcttgacaatacaaagccgggtaaagattgtgacaaatattcagcaaatgttaagaagagaacatattcagagataaaagcaagacatatcgctgactttaaagaacagtttgacaaaaccgatcttactattcagaacgatactgaatacgcagatgaatatagtaatacacctacagaaaagcgtattcgtaaagatatagatggtaagtcgggatttttgaccggagctgactcaagtctggaaaaagctaatgcaaacggtgtttattcaacttattcggaaggtgataatcagctggcaacacttgattttaactatggaaagtatttgattatcagcggctcgagagcaggaagagaagctaccggcagtgacgagatagatatacctgagagccagccgcttaatctgacaggtaaatggaatgctgcgctttcagcttcctggaatggaaagtatacaattaatataaatacagagatgaattattgggccgcccagcctcttggacttgatgtgtgcgaacagccgcttatagatacgtttgacgacttggctcagagcggaagtataacggctgcatatcagtatggcattacaaatgacaggggagacgaccagtacaagcctggtgatccgtgggtaatgcatcataattatgacctttggagaggcacacagcctattgacaatgcaacggcaggtctttggccgacaggtggtgtttggctgcttgaccatgcttggcagtattataatttcaataaagatactgagtatttagcagaagtatatccttatatggttggagctgctaagttctttacacagtttttggttatagaccccaagacagggtacttagtaacagcggcttcatgctcgcctgagcagggcggagttcaaccgggaccggcaatggatacacagcttgtcagaaacctctatgatatggtacagaaagcgtcagaaatacttggaaagacaagtgaaaacgcagagcttcttgcaaagattaatgagcagatgccttcatcatatttagctgatgaaaaaggaaaaattgctccaaatattattgacgatgcaggtctgataagagaatgggtacgcggagacgtgagctttgatatttcaagcggaaatgcaacatggcaggttataaatccgtttacaaatgagaaaacaggtgtttatgatcatactgccagcaataatggtagtcacagacattgctcaaatttatgggaaatgtatcctggaacgcatttgagcgcgtatagtgaaaatgaaaatgagcaaaagatttttaaagcttttcaggattctacaacagcacgtggagccggttctggtcagggctggggagtagcatggagaatatctcttaatgcaagagctctttacggtgacacatcgtctaagatgcttgaacagttatttacaacaagaacatcaccgaatctctttgaccagcatccgaatttccaaatagacggaaactatggtattaccgcaggtgttatagaaatgcttatccaaagtcatgacggaactataaatctgcttccggcaattcctgaaagatggaagacaggttctttcaaaggatttaatacccgcgaaggcgcaaccgtagatttgaagtgggataacaatgttccaagagaggcagttatacacgctaaagagaataaggaaatgaaaattagaagcgagtatgctgcaaatgctgagatatttgacgcaaatggaaataaggtagaagctaaactcagcagtgataatactttattgtcatttacagctgccgaaggtcaggattatacaataaagaattttggaaatgaactgaatccaacatctgttcctgagccaacagaacagccgattaaaggaagcccggttccgagtaatactcctgtaccaacacttgcgcctaatgttccgcatgtttatgatataaatgcgtcttattatgagaatgataagttatgtgttgacgttacatataatggaacagagtcagagcctaaagcaaaggttttgattggtacatatgattctcagaatcaagaggaattaataaattcaagtgaatatgatataaccggctcaaatagatatgaatttgattacgctaagcctcaggatggtcaatttgtaaagatatatgtttgggatggaacaaattcaattacacctttaagcggtgttggaacaataggtgaaaagcctgttccgactatagagccgacaaacgctccaactgataagcctgtacctacaactgacccggcaagaaccattacggttgatggttcaaaagaatctgaacctgctgccggaacttataagacaattagagaagcggttgctgcagtttctgctaatccgccgtcaaatgaggaatcaagaatttatataaatgttgttcccggaacatatcgtgaacaggtagttataaatgttccttatataacattacagaaacagcctaattctcagggagaagttaagcttacatggtactatggaactaatactttgtatgacagctgtgatgagagcggatattacaatcctgatgtaattgacggaggggttaccaaaaacgctcctaaggattggggtccggccttagtggtaaaagaaaacggcgacaattttgcttgtgaaggtttgtatctcgaaaactcgtttaatgagtattacactcaggaggagttgaatgaatatatggctcctgccgaaggttcatttgacagaggagcatggcttaatgaacagctgaataacggtgtagatgacgaaacaataaacagctggattcagtcgcgttcacctataattaaggatacaaagccgagcttgagagaaagagcagccgcaataaatactaaggctgacagaatagtatttaaaaattgtaccattatgtctaagcaggatactatgggaataaacaacgacagaatttattttgaaaactgtaaaataggcggaactgttgattatatctgcggaagtgcgacggcagtattcaataattgtgagttatattggaatgccggaccaataaaggaaacttctaaatccacagacacagattcgggatatattacggcgccaagccagtcaacacaaaaaggttatgtattctataattgtaaggtaacgggctctgaaactgcaactgcaggagcatttggcagaccgtggaatccaaatggagaagcgatatatattaacactaaaattggcacaagctcacgaccgggatacaatgcaaagtcgttgataagtgaatccgggtgggcaacaatgagtgataatccgccggagaatgcaagatttggagagtttggctcaactgacataaagggttatcctatacaaatttcaggagatttaagacagagtaaattactggacgagtggacaatgcttgaatataatccttatagttatacatgcggtactgacggttgggatccgtcagggacagctgaggattataaatctgtaaacagcgttgctgaagcaactaacgttgaaattccggaaggaacgagcacagaggttgtgctcccgtctgctccaaacggttatgaatttagctgggcatctgagtctgaatatgctgtagtaagtgaagacggaacaaagattattgttacgagaccggccagcggtgagaaaccaatagaaaccgaaataattttgtatgttagaaatgctgacgcgaatgctattggaacaaaagcggttatacctgtaacaattaatccgacaacagataaagaaaatgtgtttgaagtaaacggtactgtaacaagtacgagcggagcgcctgaaacagatattcctatcagcgttaagctctataagggcaaggcagtgattaagacagcttctgcaataataaaggcgggaacaacttcggcgtcatataaggctgaaggtatacctgttggtgattataagctggttatagatgccgaaagctctgattataaggttacagtccctgcagacggcacggtagaaatatcgggggcaaaaggagatattaaaatggttgattcaagcgttggaaaattgacccataccgttttaaatattactactgacccaacagccataggaagcggagcttcagttgttaataataatggttcatatacagtttcaagcccaagcggaacttctgacggcgcatactggaatctttccaagttagcagagggagtaaaaacgagtgattcggttactgtttcatatactgtgacattctctgccgataagccttataagcaggatgatatgggatgtatgattgatgttctttcgggaataccgggaactttaaataagaatgctaatcctatacgcataaacagagttaacatgggtcgttgggatcagatgaatatgctcgactttgcccaggcgtcaagaagcggttcacaggataccgagcatcaatggctaaaatgtgccggagaaggtatagctaagaactcatataagccacagtcggtaaaagtagttacagactttaaaaaccgtgttatgacagcctctgctaaggttacagaggcggcaagctggaatgactatacgtttaccggattccctgaagaagctgatgttgaccgagagaatatgtgtctcgcagtatatccgggaagcgcaggtgcaaataattatgtcatcagtgatataacagttgagtttacagaatttaagtaagaagatattaaatatttcttcaataaaaattaacggattttgattcttttatatttattagaaagcgcagcgaaagctgcgctttcttactgtcggtaaagtttgaagcgtttagagatatgtgcaaaagccaatgttttaatccgcgcgtccgtgggcggataagaacgcattgtggtcccaggagttgttttcaaaacattttcctttcctcagcagtttttctaacagatgataatttgagggagctgcacattttgcacaatttttcgaaactgcttatcaatatactaaaagctcggctttagccgagctttatatcaaaatattaaaaatgataggcgaaagctagatgtgcacaccagtaatataaaataaaggttaagcagaggtggaaagctatctatttaagcagcgataaaagttatttgtctaaagagtgatgtggattttttgttttaatatctcctgctaataatataaaattgttaagctataaaaacattaggctgattagtttaaccaattttttttgttattcaaatctcatatttcacctgcgtatgattttgtttcatttggcatagtaagaaatccgtttttttggtatttatcaaacaagttttcaagcgctgatatatatgcttcgtaattcggtgaatcctcagaaatcatatatgaggcagattttaatctttgtataaatttttccttagtaaatttaagatcattttggaatactttctttttatacttagtatcaaagaagtttgaaacagccgaatccatattttttataccgccgctgaatccggtaaatccgggacaatatttttgacatatttccgcattttcttttatcattttattggatgaaactctggaattccagaccagtattacctttccgccgggttttaagattcttttgcattcagctttgaattttttatggtcaaaccaatgaaacgcctgacctactgttatatagtttacagaatagtcttcaagagcagtgttttccgcgcttcctttaacggagttaaatctttcatttcctccaagcagtttttcagccgtatttctcatatcatcgtttggttctacagctataactgtgcagcctatatccagtaattgggatgataaaatgccggttccggaaccaatatctgcaacgatggattctagacccaatcctgccgagttttttagatactgaataaattgttcagcgtatttaggtcgtgaagaggcgtagacagaagacttgccggtgaatttatttgtattgtccatattcatcctccttaatcctttttaacttctgctattatatcattagatatattgaatttcaattaccaagatagattcattaaaatcaaaaatatgaaaagtttctaaaaaattagttaagtttctaaaaaactattgctataatttgggttggcgtatataatataattctgagcgtcatatacatttaaaaggcgcaatatttaattgaaatttaaaggaggattttgctcgtgggtttaggttttatagaaatacttaagacgatattgctgggcattgttgaaggggtcacagaatggcttccgataagcagtaccggacatatgatactgtttgatgaattcattcatttaaatgtaactcctgagtttaaagaaatatttttggttgttatacagctcggcgcgattcttgcggtcgtggtaatgttttggaaaactattttcccatttcattttaaaggcggctttggagtagataaagagaagataataatgtggcttaaaattttggtagcgtctattcctgccgggattataggtatcctgtttgacgattattttaacgcttggttctataattactggactgttgcaataatgcttatcgtattcggtattctatttatatggatagaaaatgcgcataagaataagcttccgaaagtgaatgatatttctgaaattacatataaagccgcgtttataataggagtattccagcttattgcggcagtatttccggggacttcacgctcaggcgcaacgataataggtgcccttcttttgggcatctcaagaacaaccgccgctgagtttactttcttcctggctataccggccatgttcggaggaagcgcaataaagcttgcaaaattcgggatggcatttacctcaagcgaaattataattctgattttaggaatggcggttgcgtttgtggtatcaatgctgtcaataaaattccttatgaattatgttaaaaaacatgactttaaagtgtttggctggtatcgtatagttttaggcgctcttgtgattgcatactttttgttctttggcgcttgattatgttttggtattgttataaaataattagatatgaaagtgagatataaaaaagacctcgctgtgtattgagctaactctcaaaagttagatttttggtctaacttttggaagatcggttcatacagcgggtctttttttagtggtaagatgtttttaatatgttgtaatatagccatattctcgttctatataatgttctccgcattacatgacgagtgtcttcggatatatgacaattttagtcttcggtaccaaattttaagctgatgagccaaattattctttggaaccaaatttcatgttattataatacttttttaattttcttcactgtctgagagtttctgaggtatagaaatgaaaactattacattgtcattttcgtttgaatattttataataccattcatgtctttgacagctttcttaacgctttttatgccataaccgtgctcagaagaattttctttgtcggttttacagttgtcagggtcaaataacagacctttgacagttgaatttttaactataaattttatcattccggcgtcgctgtgtatgtgaagagaaacttcttttgcttcggatttatcagcggcttcaattgcgttatcaagaatattaaaaagtattgtagtgatgtttgaagaacttacagttatatcgtgtccaagttccatatctatcttaaagttgatattctttaattttgcctttttaatttctatgtttatgatagaatctatggtttgattttgggtatatactacaaaggtatcagaatagtttttgtttttgatatctgaaagatgagttaaagcggtgtctgtatctccatttttaaccagcgaatatacaatatccaaatgtttgcgtatatcatgttttaaacgtcgaatttctttttcattttctttgagtagagtatagttcttgttgtaatgctctatagttttttgagcaatgccatactttaattgcgcagaataggtttcaaacaaatcaaatatggcgacattgatatacacaagacctatgtatggtataactaacagtgcatagttggtaaattgtgatttcatcaatatagcgtcaataataacaacaattaatatagttactaaaggacaaagtataattagtatccaatacttaataggaagattgcgttgttttttaataaacactttaatcattggaaaagccaaacacagcgttagtattgttgtagagcatgcagctaatattagtgaaaagtcggtatttaatatatctgaatatgtatcatcaaatagttgagataatataagcagtgtagccatttgcgaaattatataacaaacgtaatatattactactacagctatttttttagttgctttatcctcaaatgagaaaaaacagaatgttgtataacaaattattgaaattattaaattagcgttactatttaaatgaaatgttgaagtaaaacacaatattaaaaatggtataagtgcccccaaaaaagataaaacagaaaactttttgaatttaaaagcatagttaaaaataatagttaaggctataaattcaataataactatagatatatcaagtataaggctcattataacattccctctttaacactatatttaaaatattggttctcaaaatcttctctatatgatttacctattggtacaacttctttgtttatcataacagcctgcgtttttgaaacagagaatatattttttaggttaatagcaaatcctttatgtacacgaacgatataatcgcagtctaatgtgtcaaacaaatcagaaaaagttgaacgtatagtaaaatctttatctagcaaatgtatacataaactattatgacacgattcaatatatacaatatcatttaaaagaatattgtaatgtattccattattaactatctgcactttattattgtttttaaagtattcatttataattatctctatttcattgcttaattcttcgatagttgctgttttaagtatgtatctgtcaattccatatttgtaaccgttgacagcgtaaccgtcataatgagtatacgcaacaactatacagttctttgaacgtgtttttaaaatccttgtagcattaagaccgtctaatccttcaacttctatatcaactaaagcaatatcaaatacttggctgcaatttaaaaaatcatctgctgtagagcagactgttaaacttacattatatttgcttaatactatgcgtaatttgtcaatatatatattttcatcttcataaattaaaacattcataaatgctctcctaacttcataaaatattatatatcacacatgcgaaagtgtcaaccaatgtaaaaagtcataaatgtggataattttttaaacgttatgaaaaaactattttatgataattcaaatatcgacaaaattaaaaatttgtggaaaatgaataaatgagtgaaaataattttggtaaaatttaccaggaaagttgttgccgaaaattcatttataccataaaataagtttacgtcccagtatattgattttaatatgccgatactttataatttaattagagaaaaatgttgaaaaaagttacccgcagaaatgggaggaagcaaattgatagaaagcatttctaaaagactgacaaatttttttgtaagaaatggtttaatcaaagaatatgacagtgaaatatattcttacggctttgaaatgtttgtttccgaaataataagctggctgattataatacctatagcaattatatcaggtgaatttttagaaagtatggccttcgtattcagttttattattttcagaacatttggcggtggttatcatgcaaacacccattatggatgtattattagttttacttttatatatttgatagggttatttgttggtaaaactatttcaaccggtatttctttttacttaataggggcgtgcctaacagcagcggggattttgctttggatatttgctcctatagaccataagaacaaaccgtttgacgaaaatgattttaagcgtcttcgcaaaaaaacaaggctgctatacttaatttatttggcagttgttatacttttattaagtattttcccatcagttaagtttgttgttaagctttgtgcatttggaagtatggggttgtttatggtatctatgtcggtcatgattcaattctttgtgagaaaaaaagaaaaagttaattcaatataaatttaaaaaggagagaaaaatcatgaataagttaaaacaatttatgtaccgatttggtggaactatctgcgctattgcggctttcatggctgtatatacagatggaagatgtggttggaaaatatatcagccaaaggcaccagcaaatttgcgggagtttgctgagagacaatgaaaacacaaaatatattttaattaggactgtggcagatgttattttttacatcgttacagtcctaatttttttattttaaatttttatagcaaagggagagtattgtggtatgggacaaaatcaaaaattgctgagtatagcgcttattatagctatattagcgggaatggtaaatttcgtatatgtgtttgccgagaatgaaggacaagcagagagtggctcacaagcgtcaacaggtggatttgaaatcagcgttaatgaatctaaagattttgatgaaaatgcagatattgaagattttgataatttaggggaaaaaccgacagaagctccgacagaaaatactagtaaagatttttcaactgaggatgttcaaccatcggcggttccttctccaaaagtatcagaagttacagagcaagatgaaactttaataactaataacattcaagaatctaaccaaaatgaacaggggtctgttttggtgcttaattctgttgtccggtattctgttgtgagcggtttaaaccacagtttgcgtataagcgacggaaaggttcaggcatatggtgacaacacctgcggacagcttggaaccgggaataatgagccgacaaatgattttgttgatgtgacgggtgcttggggagataaaactgttgcacaggttgaaacaaggggaaatacttcatatgcgctgacttctgacggatatttatatgcctggggagacaattcaaaaggacaatttggaaacggaacaaatgtaagcagtaatctgcctgttcttgcagccgttggaatggaaggcagcattaaaaagatttctgcagggcttgaacatgctgttattgaaaacagcgagaatggcacaaaaatatatgcgtttggggataatagttacggtcagcttggctccggaactgacagttctaattctttagtaccaatacttgttacagatttttcagaactatctgaagtgggagattaccagacatactacagcggtacagacagtgagataatcggctgcggaaaaaatgataaaggtcagcttggaagttcagtggacgcagagggaaatatgatttgctttaccaaaatttcagcgggtaaagaccatgttgttggaataggaataaatggaaagatgtatgtttggggtgacaacagtttgggtcagcttggtgttaatctgcagagcggcggaacatattcccaatatccaattaataccggtatagatgtaacggatgttgaagccggaaataatatgacgctgtatatctcaaacggtaaagtgtatttggacggaacaaatgatattggagttcaaatgtggccaaaagaaataaatttgcctgctgactgtgcttcaattgccttaggaagcaatagctatgcgtatcaaagtgacggaactttttggcactggggatatatgagtgaatataacgttggcaccggagacagtgtaaatccaataatgagtgagtataaatacgatattgtggatattgactcatacagggcgcaaaccttagctatagatacggcagggagcatagtcgcatggggtgaaggatattatcctgatgaaaccgggagtatgagtaaagtatcgtatccttataatgttgatgaaaaatgtgaaatcaaaaatgcggtaagtgtttccagaggaaaaaaccataatctagtgcttgatgaaaacggagacgtttggtgttggggaagcaactcaaattatcctatgggttcacttgacggaaaagttaagataataaaaaaattgcctggtattactgatgttaaacagattaaaggcggcacagagttcagtctgtttattaagaatgatggaacgttatggggcgttggcaaaaatgataaaggtcagttgggtatatctccggaggaacttaataatactgatattccaatacaaatcacggataaagccgactttaagtatgtgaccgcatgtgaaaattctgtaatcgctattgcggatgatggcgtgtattcttggggcggcaattctaagggtcagttgggagacggtacattctcggataacccgtcgccgaaaaaactgaacattagtcttgaagatggtgaatacataaaggatgtaaaaacaggaccgcagcattgtattgctttaacaagtatgggcaatgtatacgcctggggcaataacggcgtagggcagttgggaataggaaacaaagataataaatcaactgcagtaaaggttaatttgtcagatgtaaaatatgtaaatgcagggttttatcagagctacgcaataaagtcggacggaactgtttggggctggggaagcggagcaaatcatcagcttggtactgtgtccgttggtacatgcagggttccgacacaaattacaagtttgaatggtttaaatattgagaagattgtcggttctgacggatttacaattgcggttgataagtatggaaggatgtactcgtttggctcaaatgcagttgggggattgggtgtatattcacagacacctgaaatagttgctgaggattattatgctgaagatttgagagagctaaataaatatatgaaagatattccgcagaacctgactgaaaacatacagctgccggtcatgatgcagaatggaatgcaagtatcctggacaagcagcaatgctttttatctttcagaacagggaagcgtgcgaagaccaaacagttatgcaaaagatgaaaaggtaacgctgaccgctcttgtttcctacggagaagtaataagagagcttaaatatgatttctgcgttttaaaaaaggaggagggacagccgggagataaaacgttgaaaactcagaccttaaatattgaaaaaggaaaaaaatacataattaatatcaccgctaaaaatgctactcaaataagcggaactgagtttgagtttgagtatgatggaagtcgttttgaaatggtggatgcaatatcacgatcgaaaacattcgaaacgcttagcggagctgtatatggtgatataaaaatcacgtatgccggaccgggaatcataaaatttgagacaacaaaacaaataccggccggcaggcagttcacaggatttgtaaacggaatagtcttaaaagccaaagaaacctgcgaaactgtttgttcattgttatattaggaggggcggagtatgaaaaagaaaattattattttaggaatatgtttagttcttgcagcggggactgttgcagcagtggcaagcggtgcgtataataatcaaaatatagatataaaatcagcattgtcaaaagtattttcatctgagaaatctgaaaaaagtttagttcagaaagacagtgtgcagacagattcaatatctttaaatgatgatcaaaataaatctgttataagtacggatttatcagataaggccatcgcactatacccatccaacttttattccatggttgagatattgaaatcaaatatttcagatactgaaagtatagctgatattttggcatcttatttatatttaagagatatttatggtcttaataatgaacagcttgagtatatagccggtcttattaccaatggagccgacccaaacagtatattagacatagcatacttttgggctgacacttgtgaagatataaccataattgaacagatatataataaaaaaggcgattatgaaggcgggcgtttttggattgagaatgcttataataatattacaaaaaatgttcatggggttttaaaatctgaggaaataaataattatctttctttgggagtaactgtttcagatatacagaacgcaaatactttgagccgcaaaggagtttattcaattaagcaaattttagacagaattgccggcggagatacaatgataaacattataaacgaagtatatggcacaagcataagtcagccggtcagcttgtttggaataagtgaaaatgaaaaatctgacgagagtatattgaacagcaaagagcttgcggcgcttgagaataaacagattgaggaatctgcttcagagattttatccgatgagaaaacagctgaaagactggtggaaaaaagaaatgaaaaaaatgcggaactggtaaaacagctgataaatgagggaatattagaagggagaatagataaagatttgggggttgtgtttgatgaataagataaaatgcagattaataatatgtatagtgtcaatattagtaagtatgataggaatcacatgttatgcgtcaacgtcagatgagttgtatgaacaatcgttaacccaaaacttgatagagcagtacggagcggattatgaaactccatttatagctcctggcggcaacgtgtcgctgagtgacggaaatgttaatataaatgaggtggatatgagtctgccaggaagaaatggtatggatgttaatattaggcgtactcattatgtaaacggcggacctgtcagttacagcggcacaagagtatttgccagagggggaagcgttcaaacaagtccgatgtatgtgtttacatatgttttaaacggtaattcaaagacaatatatgtagcgtttgataaagaggaggatttggtagacagtttttatgccgagtcttcaaaattaaatacaattgagactgacgccataggtaaaaaatattataaatactcaactataaaggatacatccggagtattgttcactagagataaaagtaaggctgcagtaaaaatgagcgaagtacctaatgagttttatacaaccacagtgcatgctaccgatattgaaataggttatggctggtatgtgtcaatgccgcagttgactttggtaaacaagtcagaacaagcctctgatatgaaatataagtatttatttaaagatgaaaacggtcagacaatgaatttttcatatttgaaagaagaatcgaaagattcaggctggatatataaaccgggaagctgtaaagtttcagattcagacagccaatatacagctcaggtatatgacgaacttcagacgcatagtttaggatttaactatgatataacaataacagacggtgaggggaagacatattattacgaacaaaccttgaaaacatactttttacctgccgcaattatcgataggtacggcaatgccgtccgttatacttcgaacgctgacggaagcgtgacgatagttgatacttatggcagaaatatacacgtgtcgcaggcaggtataactgtctcaaatgggaactttactaagagcgtagaatacagcctctcaagggtaaacagtgacagagacccatacggtctgctggattgttattcgaaatatattttaaatgttaagaagtataatggcgtttcttatgagactacagaatacgtatcgcataagagtacaatgctttttgtcaggagcggtgaagtaagttattatgataaaattgagaaggttacatttccgacaaatgcttcggtagagtatgaatacgaaactgttccaacagttaaaaagtttgcttccagtattggggcgaatgtggtttcgcattgtgattatcatataaataaagaaaaagtatatgaagacggcagtgaaaaatatgaaagaacatattcgtttgaacaagcttcccagaaaagttatgtagataataaagaacgcagtgttacagttgaggacacatatgacgacggaagtaaaaaaagtatgacttatagttatgattatgccggcagattgtttgagaaaagcggacaaattgaaggcaaaaaatatacagaagaatataagtattcctatacttctcagaatcttttatcatcaattccggaagaaaatatgctgaaatacagaaaggcatatttgaagagcaccattactgcctatgacaataacatggtaaatatagcttataatgagtataacagcagaaatcttcctacgtatactatgaacggagagttagagtcattatatacatatgataataattatggtatattattatcaaaggaatatcaaaaagacagcaatactaaaatgaaagtaagtaataccataaccgcggacggaaaaagtatcttaaagtcagaagtttttgaaaacggctctcaaaagacagttacttcatatacatataatagtgatggcaccgtagcaagccaaattgtcacaccgacagtcggagaaccgcttactacagagtttggatatacatataatcctgacggctcattcagcataacgacaaccgttaataacgttaaggataatgacggcagcagtaagtcggtgacaacggtgcagaattatgactggctgggaaacttaacatcgtctgttgacgctatggggaatacaactgtatattggtatgataacctaggaagggtaatcagacaaataaatcctgatgaaacatataagaaaatagactataacgtttctgacaacagcgttacggttactaatgaaaacggatatgcaacaaccaaagattattctccgcttggctatatggataagatttattttgataatgatttaaacaagctggctgcagagtataaatacgataaccacggcagaaaaataagcgaaacagcatatcaggatatcggaggaaaggctgtaaaggaaaattatacttatgaccagttcgacagaataaagactcaaaccagcaaagaggatgatacagttttagataaaatcaactatcagtatagttatggagagggataccaaagtttgggtgagggaattaatatagtaaacgttccttctaacgccaaaaagctaacagttttattctacagcaaatcatcgaggaactatgatgcagctgttcaggacgacaacagcgtatatttttccgaaaatatgacatacggtaaaacaaaaggaaccgttgtcgatgtgacagggttgtcccaaataagaatttcggcgggatacagcggagcatattataaattcctgaccgatgaagagactgctcagaatataaacctgctgggcggagcaagccaaacggttacagcgacatatacaggggatgaaacatatgtgaaaccgacagttgaaactgtattggacggatttggaaataaagtgtcagagacttactataagcacggaaccgatacagtgctgaacaaaaacacatataagtacgactatgccgggaatgtgacggagactcttggcggacgaacttatatggagaatttgggaagctatacaagcaaagctgaatataattatatgggtaagcccactaaagtatatcagacggacggtagttatgtaaccgctgagtatgatgattacggaaatgctctgacaagcacagactatgaaggcaatacaacaacggtatgttatgatatactgggaagagcaatagcctgcgaagcgccgtttgatgaaacgacaaccacaaaaagcctgacatattatgacgcaaacggaaacgtgataaaaacaaagcagcaggtgacggcttcaagttatactgagacagaaaacgagtatgacaaccgcaacaggctggtatcggtgaagataaacgatggtgagcgggacatatatacgcagtatgcgtatgacggagcagggaatgtgataaaaatggtaaccggtcagacaagcaagatagaagatttgtatggaaccctgccggaagaagcaacgtatcaaacttatgagtatgacagatttggaaatgtgacaaaagctacagacgcactgggacaggacgtaataagtgaatataacctaatgggactgccgaccaaacaaacggacaaaaatggaaatgaaacagtaaatacgtataatgcgtatggaagcgttctgacgagcaaggtgacaggagacgaagatataatcaatacatacagcaagaataatcttcttatatcaaccaaacaaggaaaggaagagataaaatacacctatgacgattatggctatatgaaaacagaaagccaagggaatattcagaatacatatagttatgacgtaaacggaaacaggaaaaattatacacaaaaagcaggaacaaacacaatactgacagggtcatatacatatgacatattggacagactgacagaaatagattacggaacagtaagcgcgggatatatgtataatgcgaatggaaggctaacaaaggagacaagaggaaatataacaagcgagtatacatataacaaagccggattggtgacagagatgaaaaatagttcaggtcagagctatacatacagctataacttggcaggaaatcaaactgtaaaagcgtcgggacaggagataacaaactatggatatgatggaataggacagctgataactgaaaatgtagtttcgcccaaagaagatgaatgggattataataatacatattatcagtatgagcgcgcagtcgcggaaaagataaatataaaggtattataacaaattgttgcatatatgttcacgctgcgcgtgatatgatggctcacctaacgaggtgtgcttgcgcacaccctcccgaagttcactaaaaaactcagcatataagaaaatattttaaataaaaagttatatatatataatttcggtatagcaagcatcggtagggcagatgtaatctgccgcgtaaggcgcgcagtcgcggaaaagataaatataaaggtattataacaaattgttgcatatatgttcacgctgcgcgtgatatgatggctcacctaacgagacgcgcaagcgcgtcctcccgaagttcactaaaaaaactcagcatataagaaaatattttaaaataaaaaattatataaaattttggtatggcaagcatcggcagatgtggtcgcaatccagacgtgattcgctggaaactcgatgtaaattaatgataaatattataatttaatcattaatttggaaccacagcagcgcgcggcgcgcaagtatatttataataaattatttgccttattaacaaaatagccgaaaatgtttatatcctctcgctttaaagtgaaaaatctattgcaaaatggttttaataatagtataattactttgtttaagatatttaatttgaaaatcagaggtattgccttatggaaaaagaagtatttactgttaatttggaaaaagtaatacgtgaaatgaaattggatagactttattatccaaataaagaagttttgattgatacagccgaccttaacagacccggcttgcagataacaggatttttcgattattttgacccgagccgtattcaggtttttggtatggtcgagaatacgtatctcgccggattgtcttctgaggttcgttacaatagtcttaaaagactttttgaaaaacaaatatcagccgtcattttgactagaaacagtaatgcttctgccgagatgctgaaacttgctgaggagtttgaaacgccggtgctgagaacttctcagcctacatcgtcttttacaagttcgctaaacgcatatcttaacgtggaacttgcccctagaatcactcggcacggcgtgttggtcgaagtatacggtcagggagtgcttatattgggtgaaagcggagttggtaagagcgagactgcggttgagcttattaagagggggcacaggcttgtggctgacgacgccgttgagataaaaaaggtttcctcaaaatcgctgattggcgtgtctcctgatataatcagacactttattgagataagaggtataggaatcgtggatgttaaaaatatctttggtatgggcgctgtcaaggagtctgaaaaaattgatatgataatacatcttgaggcctgggaaaagggaaaacagtatgaccggctggggcttgtggatgaatacaccaatattctgggcttggatattccgtctcttactattccggtaaagcccggcagaaacttagccgttattttcgaggttgcggctatgaataacagacagaaacgtatgggttataatgcggctgaagagcttaacagaagaataactgatcaaatcagtcattttgattgataaattgctatggaggtaattatatttgaaagttttagttgatacacatactcacacaaactgcagcaatcatgcttttggaactatatgggaaaatatgaagtgcgcaaaggcaaaggggcttgaaatggtttgtatgaccaaccatgccccggcgattccggattcccctcatatttggcattttaacacaatgaaggaattgcccgaatatattgagggtgtgagactgctttgcggctgcgaggcaaatatcctgaattctgacggtgagattgatatgcctgttcagtatttaaaatctatggatgttgttgtcgcttcaattcatccgccgtgttatgagtctaaagacttgccggaccataccgagacatggctgaacgtggtgaagaatccgtatgttaatatcatgggacacagcggcgacccgcgttttccgtatgatattgacgctgttgtgagggcggccaaagaaaataataagtgtattgagattaataaccattcgtatgcggtgcgcaaaggcagcgctgagaattgcagaaagattgctgaaaagtgtatggaagtcggatgcaggattgttttaagctcagatgcgcacagtccgtttgatgttgggaatgttgaaaacgggataaagatgctggaggagataaactttcctgaagaattggttatgaacacaagtgctgacagatttatcggctatttaaggtcggttggaaaagatattgtattgtaagacataatattggagggaacgatgaataacatgattataaccctggcaaaaggtatcgtcggggaatcaaatgttaagacagatgagccgatgagctctcacacgactttcagggttggcggagcggcggatttatatattactcctcagaatgagagccagcttgcttcgcttatcaagcttttcaggcagtttaaggttgagtttcatgtaatcggcaacggttcaaatcttcttgtgggagacaggggcgtcaggggagcggttattgaaataggaagaaatctgagcagtattgaagtttctaaaaatatggtaaccgcacagtcgggagttctgctttccaggcttgcaaattcggcggcaggcaatggtcttgcagggcttgagtttgcgtcgggtatacctggctctttcggcggagctatatacatgaatgccggagcttacggcggtgaaatgaaggacattataacagaagtagtttatcttgatgaaaactgtaaaatttgcaccgtgagcggcgaagactgcggttttggctacagaaagagtatgtttacagacagcggcaagattatactgcgcggaacgctcaggcttgaacctgatgaaattgatgaaataaaggcaagaatgcaggaacttacccgcagaagggttgagaaacagccggtagacaaagccagcgcaggaagcacgtttaaacgtcctgagggatactatgccgcggcgctgatagaagaatcggggctaaaaggatattcgtacggcggcgcttcagtttcggagaaacatgccggatttgttgttaacaatggaaatgctacggctgaagacgtgcggaatgtaataaaacatgttcagaaaacagttaaagaaaagtttggggttgacctaaatacagaggttaagtttttgggtgaattctaaagtctaaggagcagaaaagtgaaaattttaattgttacagggctcagcggagccggaaaaactcaggtgattaaggcgcttgaagatattggtttttattgtgttgacaatatgccgccggagcttataccaaagtttgctgagatatgccataaggcgacagaaaaaatggataatatagctattgtcaccgatatcagaggcggcgatatgttcggcgagctgtcagaagctataggcgagctcgaggagcttgggtttgagtgtgaaatactgtttttagaggcttcaaacgagactttgataaaaaggtataaggaaactaggcgcctgcatcccagcgccggcggaggcaggataattgacggtattaacaaagagcgcgttctgctgagcgacgctaagtcgaaagcggcgcatataattgatacgtccgacttgtcggcatcccagctgaaagctcagataaaatctatgttcagttcaaaagaggatttgggactgattattaatgttatgtcatttggtttcaaatatggtctgcctatggattctgatttggtgtttgacgtaaggtttcttccaaatccgttttatattcctgagctgaaagaaaaaacaggtcttcaaacctgcgttcacgattatgttatggagtttgatgaaagcaagaagtttttgaaaatgctgacggatatggtgtcgtttctgatacctgaatatatcaaagagggaaagagtcagctggtaatatcggtcggctgtacaggggggcaccacagaagcgttacccttgcggaagagctttataaattcctaaaaaagagcggtaataacgtaactgttacacacagagatattaagaaggggatatagccgcggctatatgtatcgtattatggcggtttcaaaatatgaaaatttcaaaaaaacaaacagcaccgggtttaatcccaaaatagtttctgtcggcggcggtacaggattatcggcaatgctgagaggtataaaaaaatatacttccgatataacggcagtagtcactgtggctgatgacggcggcggaagcggcgttttgagggaggatcttaaaatgcctccgccgggagatataagaaactgtattctcgccctctcagaggttgagcctataatggaaaaaatgcttatgtacaggtttgacagcggtctgcttgaagggcaaagttttggcaaccttttggttgcggctatgacaggaatcttcagtggagattttgttgaggctgtccgaaacgtctgcaaggttctgaacataaccggaaaagtgttcccggttacggcttctgacgtagagttggtggcaacgcttgaaaacggacaaactgtggtgggggagtccagaataggaagttcggtgagtgaccataacagccacataaaaaaagtgcgtttgcgttctaaatctgattatatgatgcctgttgagccgctgaaagaaattttagacgaggtgcggaaagcggaccttataacactgggtcccggcagtttatatacgagtgtgctcccgaatttggtaatcggtgatttaaaggacgcaataatggagtctaaagcgcctgttgtatatataaataatataatgacccagcccggcgagactgatgaatatacggcttttgaccatgtgctggctatattggatcatacatatgacagctttattgattattgtattgtgaacacaggaaaaataagcggagcgcttctcgaaaagtatgctgatgacggctcgtgtcctgtggcttatgataaggaacgtttcggttctacagatataaccgtggtagaaagggatttgtccactgtggacggcaatggttttgtccgccatgatataaacgttttggcggatacgctgcttgatataattaatataaacaggaacgagcaggggcttaaagtcagttctgaaggcgttttgttatataaccctaaaacacggcggaggtgatagttgtggataagtttggttgtgttaaatctttttcaagacgtgttaaagaggaaatatacagaacagaggttgttgaccagtgctgtataatggcaagattttcaggccttattctattcggagcgaatattatcagcaaaaacgagataaaatttgtaaccgacaatcaggatgttatgggcagttttgtagagctttcacgcctgcttgggatagaagctgatgtgaaacaggtaagcgataaaaattttaaatacacagcttcaatatcagataatgtaaaaatagcccaattgttatatgatttggatttgctgaacagccttacaggagacgttaactaccatgtcagccgcagtatagtgaaaaggccgtgctgtaaacgggaatttttaagaggtgcatttttgggagcgggtacggtcagcgacccgatgaaaaattataattttgaaattgtgacctcaaagtttttgctttgtgacgaacttataaacctgtttatggaaatggattttaagtttcataggatagagagaaaaaacaagtatgtcgcatatgttaaaaacagcgagataatagcagacatactctcatttttgggagcgtataagtctcagatggagcttattaatattaagatagaaaaagagataagaaacgatgttaacagaagcgccaacggggagacgtcaaatttgtcaaggactataaacgcgtctgtggaacagatttgcgcgattcagaaaatacagaaaatgacaggtcttgacagtttgcctgacgacctgcgcgagattgcgattctgcgtttggaaaatccggatttgagcttaaccgagcttggcggacttttaaaccctccgctaaccaaatcgggcgttaatcacaggatgaaaaaaatactggcgtttgccggaaactagatactaaatatataaaataaatactcagccttcaaaaactgttttggtttttgagggctttttatattataaaaagaaaggacccctttcgccggacgcttgaaagacgaaagggggtggagcttaatatgtttgttttgtttagaaagttatagaagaattatgattatggtttaatatttactcctcttcgcggatggtctttactccaaacatgagttttaggattcctctgataacctttgggggttttataacaacgatttgcatatgtattgctcctttataatatatttaggtttgataacctataaaacgaattcacttcttttgtttatttgcatatgaatttaactcccgcacaaatgagtgcgataccgaataaagctataaggaggtaggtcgggattatttgtgctaagaatacgcccactcccagagcgacaagaaccggacccagtattgatatgctgtttttctttttgcagcagggcctttttctgaacatttttaacacctcatctctaacttgcctcagtataatatattcaaaaatcaaaatttggttacgaacctgaattttatcaatcatattcttgtctgtttctgcatatcatctaacaaatgattcatgccggtctaccaaagttttaaggaggaaacaataatgcgagataacttgtacaatgacattgcactcaggacacagggggatatttatataggggtggttggcccggtaagaacgggaaaatccacctttataaaacgttttatggatctgttggttctgcccaatatcggaaacgactacaaaagggaacgtgcaatggacgaactgccccaatcggcagcgggaaaaatgataatgaccactgaaccaaaattcataccaaatgaggcggcacagataaccgtgggagaccacgccaatctgaaagtcagaatgattgactgcgtgggatatatagttcccagcgctttgggtcatattgaaaacgagatgccgagaatggtgatgacgccgtggtctgctaatcctatgcagtttgagcaggcagctgaaataggaacgcggaaggttatatcggagcactcgactgtaggggttgttgtcactacagacggaagcataaccgagatacccagagaagattatgttggagccgaggagcgtgttataaacgagcttcttgctttaaacaagccttttgttatccttcttaattccgctcatccggacgcaaaggaaacaaaagaattggcaaaacaaatgcagggaaaatacaatgcgacagtaataccggcgaattgttcagaattaaatgaagaagatatcaacaatattatggaaaaaatgctgtatgaatttcctcttatggaactctctgtgtcagttccggcttgggttagttctatggataacacaaatatttctgaagatatttacagcgccattgaaaacgctgaaaagatatcagacgtagatatgattcctaaaatattaaaggaagaatgcgagtttgtggattcagctcagattgttgaaatcaaccctggatatggagaggcaaggattgaggtttcggttcctgacagtctgttctataagacgcttaacgaaaggtcaggattaaacatcaatgataagcaggctttacttaaagagatagaagccctgtcaaagatgaaaaaggaataccagaaagttgcgtatgctttgggcgaagtagaccgaaagggctatggaatcgtatacccatcaatagatgagctgactctcgacgagcctgaaataatcaagcagggaagccggtttggagtaagactcaaggcgagcgcaacatctgttcatatgataaaagctgatataaagacagaggtaagcccgctggtcggaacagagagacagtctgaagaacttgtagaatatctgatgagcgagtttgagagcgacccaaaacagatttggcagtcaaatatattcggaaagtcgctgcatgaacttgttaacgagggtctgcacaataaactgtcgaaaatgcctgacgacgcccagcaaaagctcagagaaactttggagcgtattatcaacgagggcagcggcggcctgatttgtataattttatagtttaacaatataaaccaaatgatgagttatagactttaacgtccttgactcatctttttttatggaggtatattatgcttgcttttataaattctgtactacagtcattaatattgcttatatcatatatttcaaaccacaactcttttccaaaaccgctgtccaaagaggaggaggcggaatgcctgaggcttatggcggaaggagacgaggaggcaaaaaataaacttattgaacataacctgagactggtggctcatgtggcaaaaaaatattcgtcgtcaaccgcgtgcgccagcgacagcgaagacttattgtccataggaacgatagggcttatcaagggaataaacagttttgacgcctcaaaaggcactaagcttgcaacatacgctgcacgatgtgttgaaaatgagatacttatgatgttaagaagcaggaagaagaaccaaaatgacgtgtcgctcaacgactctatcggtactgataaagagggcaacgccattatgcttatggacgttatagaaaatgacgacgaggatatttttgaagagatacagtcgggcgatagaataaagactttatataaaaacattaaatataaccttacgccgagagaacgcaagataatcactctgagatatggactgatagacggaaaatgtctcactcagcgcgagattgccaaaatgctcggaatatccaggtcttatatttccaggatagagaaaaaggccatttcaaagctgggcgagggaatagtggattaaagagtttaacgaaaataaaacacacaaaaaaatctgtttcgggcagtttattttcagaagttatttccttgacagcatgataacagctgtggtataaacgtgttatagggatatactattgatgaaaataaacaaactcggagtgtgtgatatatgataaagtttattgcctgcgaccttgacgggactttacttaattcatccaaagagcttcctcgggatttgcgtgcgacagttgaacgcctgaataaaattggagtaacctttgccccggccagcggaagacagtattataaggttcttgaacagtttgagcctatcagcagaaattttatgtatatagccgaaaacggcgcgtttgtcattaaggatggtgaggtaatcgtccgtgactgtctttcgggagccgttgctttggatgttataaaaagaacgagaaaattgccgagtgtttaccccatattgtgctgtgaagactgcgcgtatatggaaagttctgtcggcggttataagcctgttgaggtcggtcagtattttaggagactggaatttgtgcccgaccttactgattattgtgatacaaagaatatactgaaggttgcagtatatactccaaacgacgcatatgagaatatttataaaaagctccctgaataccctgaatctgctcagataatcctgtccggcagagaatgggttgatgtgatgaagattggagtatcaaaaggctctgcaattaaaaaggttcgtgaaatatgcggctgggataagtccgaatgcatgtgttttggagactatctgaatgattacgagatgatgtttgaatgcggtgaaagttttgcgatggcaaatgcgcatgaagatttgaaaaaggcggctaaacatatagccccgtccaatgatgagaacggggttatgaagtcaattcaaaaatggtttgggttataaagaaccgtttaggagcggcgtccatgtgtccatcagcagttttgcgcccgcctctatttctggtattgaaagctctccaaatccaagaataaatgttttaagaggaactttcgggttttcctgctccagcgcattttttatataggatagctttaccccttttttatgagctgagacaatcaaattctcctcggatatatcgggctttggcaccattaatattgtggtgcctgcgtccgtgttttttatttctattttttgacccagcgggtgcttgcaaaggcaggaaaccaaatgttcctgtttgttttgatattgttttctgagccgttttaggttggtataataacttccgtttttaattatctcggctataaactcttgctcggcttttgagacgtaagaatgataggtataatattctttctgccaaagattgacaagatgttccggcaggattaagtaagctgtgctgatgttgggtgctatgctccgctgaaagtctccggcaaaaatcacgtttttattttggctcatcgaaaagagcggctttgactgatttttatatacaaaatccatgtcgtaaccatactcgattatgtatctgtcttttcctgcccaatcgagaatcatccatttctgctcttttgacattgtataatacattggataatgatgaaacggcattaaaaataaaatatcagcgttaaaattgtttaacgatttttgtgtaggtccgtctgtctctatgttgagatatgacatttgtcgtccgccgagtctcatatatctggctattctataataagccgggttttcaagaccgaacaccatatcatttcccattatacgaaacagagagtcgagtagggtttcaagacccgagcctactataacctgaagagggctgcagtttatatccagggttttgttgagcataaggcttatttgttttcttaaatcatatgttcctgtatagtcgggataggagaatgcgtcctcaataaaattcttgagacagtatttatatgatttttttaggcttgccggaaccgaaaggtcggaaccgttcctgctgaagttataagtgtacggagcgtcgctgtgccatttgcgctcgggcacattttcatcagtttttgttatatcgttaacatagtatccggatcgctcttcagatgatatatatccgtattggacaaggagattataggcatttgtgatagtgttaaccgagacgttcatctgcttagacatctgtctgcttgagggaagacgtgtccctcccttaatttcgttgtggttaattttttttgcaagctggttgaacgcctgtatatacagcggttcggagctgtctctgtcaaaatctatgtatatcatagttttcccccaaatgtagagataagtaaaatttatccaaatttcaataataaataatgtattaatatagtaattatagcacaaaatgtagatagccgcaacagttttataaggagtagaacataaggggatattccaagatgatacggtattatacgggcttgacatagaaaatattgtatgatagaatacaaaggatatttttaggaatagaaagggttatattttatggaaatgattgatttgagccgttacactggaaaatatgatattgagaccgttattgacggatttgaaaaaggaaccgttaaggacggggataccgttgaaatagagggaatgattcaccgtatccgcgctatgaaaagctttgcgttttttgttttgagaacacagagaaatttggttcagtgtgtttatgaaccatcagacagtgataagccgattgcggactttaaagaagaggacagcgtaaggctgaccggaacgattaaaaaggacgacaggagcgcgcttggttttgagattcatatcaatagtatagaggttttgtcatctcctgccgaaaatatgcctattgttataaataagaagaaactggactgcaatgtggacataaagttggattacagatcgttgtcactgagaaatccacacgaacgcgccgcgctcaaaatagttgacggtatcataaacgcctttaggtcatttatgcacggagagggatttactgagtttgttccgcctaaaatcgtttccgcaggagcggaaggcggagccgatatgtttgaggttgactatttcggtgaaaaagcattgctcaatcagagcccacagatgtataaacaaatgatggttggagtgtttaagaaagtatataccgtagcgcctgttttcagagctgagaagcacagcacatcaagacatataaatgaatttgagggtcttgattttgaaatgggatttattgactcgtttgaagatattatggctgttgaagcaaggtttatgaagtatatgtttgactatcttaagacgaattactctccggagcttaaggagcttggagtggagcttcctgacattcctgacattccgcagtttaaatttatggagataaaagagatcattgctgacaaatataatagggaattcagaaaccctaatgatttggaaccggaggaagaacgtctgataggtgagtatgtaatggaaacatatggctcgccgctggtttttgttactcattacccttccaaaaagcgtcctttctatgctatggacgaccctgaaaatccaaaatatacgttaagttttgacctgcttttgaatggagccgaggtaaccacaggcggtcagaggatacatgattaccaaaagcagcttgacaaaattaagtccagaggaatgaaccctgaagagttctcagactttttaatgatgcataagtatggtatgccgcctcacggtggattgggtataggtcttgagagactggcgatgaagctgctgggagtggataatataaggacagttaccgcattcccgagggatattggacgtattaatccttaaatcgggacgggattggtttgttatattccggctgagataaaatttaaaaataaacggattgacaatatttttgtcaatccgtatttttatggttttatattattaatatttgtttttattttatataatatttatgagcttaacctataaatattatataataaataaactattcacctattgtttttttatattctgcaagatcgtttgcccactgctcaaatccgtattctcccctgtggtcgggcagatgatagttctcatctaaaaatttccctaagtattccgtaacttttactgcgccgctgtggttcatatgccagccgccgtcccgggtgtcggtgttccagtctatgccaaaactgtctctgtttatgttaaagtctatgaattttaagccgttttcatccgcataatcttgtattgcgttatgtttttcataactccagcttttagaggacggcacgtcaatcaataaaagctcaatatcattttctttgcataactctgttattttgtctaaaaagaacttttgtattttatgaaaggattcaatattttctgtttcattcatatattctcccccggtgtatggattggaataagtgacgtattcgtaaccctttaaaacattggggcggttatgggagggtactgttgtaaaatccctttcagtgagttttttccagcggttgtgatattcaaacagcggaaaatcctcacttatgtattcgcttattatactttgcaggtcgcttgcggtcgaacggtattgaaaaacaacgtccgtttctaaaatacacagtttaggtttatgtttgtctatcaatgatttcagcagaaaatatgagcggtaaatcatttgattggattcacccgccgcatatgaggtatagccatagtcttcccatagctgcatgggcgtcattgcggcaaaaaggttgctgtttccaactgcgaaaatatctaaggtgtttttacactcagcatatatatcgtccgcgtctgttaaatggattcccatttcaccggcattactttttggagacaccacgtatgcggcaagacaaagcagtataatgaggattaatgcaaatagtatacgtctaaaccatttcattttatttctccagtcgttttaatatgaggcgtacatcagcgcagagggtgaatatccccagccatacgcgccgaaaattatgattgccagcacacaggcataataaaccgcccagcgtgcagccgttggtttttcagatagtttttttctaatatccagtccgcgctctcttaaaatttccatagtcagcaggactgtgcaggatatgattaatataattatatcgttaatatcaacttttagattaatgctaaagaaactcaaaacctgagccggattaaagtctgtaaatagttttgtaaacatatttatacagacttgaagattatctgccctgaatatcagcattccaaaattgaccaggacaaaagttctgaaaattttaaatgctttatatagtttgctttctttttttatattcaggctgttttttattttattaatttccggttctaaaaccattcctaagcttataaggataaaataatacagtccgtatgcagcgtatttccagctggcgccgtgccacataccggtgctgaaccaaacgagaaataaagcgcagactgccggtataagttttccggcacggttgccgaagtggtttcttgaaaacttgccaagtttcttgacaggagacgacagggaaacagggtagaataagtagtctttaaaccatgttcccagcgagatatgccaccttctccagaactcagaaacactgccggaaaaaaacgggcgttcaaaattcttaggtattataattccaaacagttctcccgaaccgcgcacaatatccatacagcctgaaaaatcgcagtagagctgaattgtatagcatagcactgatattgctattatagctccgccgtaatttgaataattagaaaacacttgattaaccagcacgttgagcctgtcggctattattatttttttaaacagaccccaaattatcagctggaatccggaaactatgtttttggaatcatagtcgtttccgttgtacaaactttcggcagtctgactgtatctgcaaatcggcccctcgattagctgggggaaaaacgttaagaacaaacaaactctgaatgggtttttatcagccttgacagtgcctctgtatacgtctgttatatagctgactgcctgaagagtgtaaaatgatatacctaggggcagcattagggaaagcgtaggaataggggttagaccaaacagattgtttatcagtccgtttatattggagccgaaaaagttgaagtatttcaagaaaagcagaactcctataagtatagaagccgatattcctgtgacaatctttttctcacggttcattttctgttttattgcttttctttgtgttttatctgaatctgcaatgataccggcgtatttttggtttattctctcaagccaaagtcctgcagcatatataaagagtgaagacgcaagaatgaatactataagcgctccgcccgttattaaataaaacgcaaagcttgccaataatagaaccgcccagcggtatttttttggtgtcagataatatccgcccaaaacagccggaagaaacacgcatagataaataggcatattgtattgcatatgatctctcttttcttattcttgttccagtctttttatcatttcataaatgctgtttacagatttaaagttgtcatgggtgacgtcaacaggagttatttcaatatcaaaattgttttccagttcggccgatacctgaactatatctaaagaatccaaaaaaccatcggctataaggtcctctgagttctcaaagccttccccgctgcaaatgccgcttaaaatttcaatcagttcattcattttatacctctccttttatatataggttttttaatttgtttctgtcaatttttccgtttgaattgtaaaacattttatttagaaacacccactttgcaggtatcatgtatttgggcagtttttcttttacaatttttttaatctctttaatttcagaatcagtttgaagaaaagcggctattttgtcctgctcttcatcatatatgcaggaggaagcctgaacattcggaattgaattaattgcattttctatttctccaagctcaatacggtatcccatatgcttaatttgatggtcttttctgcctaggtatattaactcgcccttatcgttcagttctactaagtcgccggttttatatataatttcaggatagcatgtgttgtttgggttttgcacaaacgcctcggcagtttttttcgggttattataataccccatggcaacaatagaacctcttacacaaagttctgtttgtgtattatcgccttcagccggtataagttccagcgcgcaattgtcgcagggcttaccaatcggcagtgattcatcgtcttgaaaacttctgtctaatatatagtaggcgcatatatccgtaacttctgtcggcccgaaaagattggcaaacaatacgcccggaagatgtttgcgccaaacattcagttgtttcataggcattgtctctccggcgaagagaaccttttttaatgtttttggaacgcagtagtcaaatgctttccagtttgcaaccaaagccagtgcagagggaacccaataaatagtgttgattttgttttcgtcaataaactttaacagctcaagcggaaacgaaaagagactttggggaataatgcaaagttcggcgcctgtcctaagcgacgcgtaaatatcaagaaccgacatactgaaataaaacggagtttggtttccgaaaacggtttcattgtttatattaaaagtatctattacccatttgctgtaggatataacatttttatggctgacggcaacccctttaggtattcctgttgaacccgaggtatacagtacgtagagcaagtcggtatctatagttttatttctgatttcggagagcaggctgttgtttatattatgaggaacggcgtcaatagagattattttggtttcagggaatatttctttagactttgaaaggtgcgaaccgtctgttattattagttcaggttcaagattgttagttataaggcttaaccgttccgccggcatttttatatccagtattacataaaaattaccgctgtagactgtgcccatcattgaaataagcgtttcaatacttttttccatatatatggcgataggacggcgtttgaatttaaatttggaggctatatatgagcctgtttccatggctgctgttttaaacctgctgtatgtaatagttcttttgccgtctgatactgctgttttgtcaggataaagcttttctgagttttccagtaattctaaaatgtttttcatattatcctccatgagtagcttttagataaaattatatatgatgttttttaactatttttgtagtatgtttgaacattttattaataatgggcaataaaaaagagcctaaaatagttaagaacgataaaaataattcataaactataaaagctctctgtatttacttaaaattacttaaaaaatctaatataatcttcttcctgacggtttttcttctttttcataattcggtttttcatctacgtctgcgttttcgtcaatatgctttcttatttggcattccgcattatagctgacgatgaaccctgtgaaagaatatagcagcagcacggcaaatataaggtatattgtgaaaagcactgtaaatgaaccgcttgacagcataaatattcctaaataaccaacgcctactgtcatcaaaagaagcaatactataacaagaatactgtacggcaggctgaccaagcaaaacagcgcggcatttctgtaaagttttccgatagtcagcttatatctcaccataagcggatacaagaacagatgaaccattgcgtagaaaaggaacaagcaataaaccaggtattttccgtatttcaggaaattggtttgagacgagtagaaggttataccgtagaagaaaacgaaaagcgctatcaaatcaattatataaacagccaaagactgtttaaaattgtcttttattgcgtcccaaaagtcacttaatataaaagagttttcttcacgagagtaatttctaaggatatagtgcatacctgcgcttacaggtcccataccccaaaaaactgtaaatagtatagtaacaaaagctctgattcctaggtctatggttatgtacatagcgctgaaatcgctgttgctgaaatcaggagcgctcagtccgaccatactggcaatttggtttgagaacgttccgtataccgcgtttgaaactgtacctgaaagaaaaaacacgattaaaaaggttgggatatttgccaggcaaaaaagcaaattgacctgtatgaacttccagaactttcggataaatatttcaaaaaataaaacagcgccctcgctcttgggttcgagagggtccacacccttaccgggtttattatagtttttcatgctgaaaatgcccataaatcaatctccgtttcaaaaaaatttactatttggaagaaaatccataaaatattaaaatgattataatattataatagaaaaacatagtcttgtcaacgagaataaaacgtttgttacggttttataataaaataatggaatattttttaataaaaatgtcagtgaaaataatgctaaaatatttcccaatatgttgcagatatattgctgcagagtagtttagcacaaaattattttttcatattaataacattatatttattggttttgtctgtgtttgaattgtcaatgattatatatagtaagttattgacaaaaattttatggtttggtataattaccactaatatgtaatcaactttatagcgaaaagagtgatattatggaagtaacaaaagatatggtttcgtatgtggcggaactttccagattaaaactgaatgatgagcagattgaaaatgccaggcagggtcttggcgagattataggctatatggacgttttgaataatattgacactgaaggcgtcgagcctatgtcacatgcgtttgccgtaaaaaatgttatgcgtgaggacgttgttaagcaaagcgccgacagaaaagagcttttggctaacgctccaaagtctgacgacgaggctatcatcgttccaaagacggtggaatagccatcacgtttgagaaatttattttggaaaggaaacggataaatgaatattactgattatactgcccttgagctgggcaaaaagataaagagcggtgatattacagtcgttgaagcaaccagggcgttccttgatgaaatcaaggcaaaagacggggttgttaacgcgtatatcacagttacggaacaggaagctttggagagggctgaagaagttcagaaaatgatagactcaggcgagctcagcgattctccgctggcaggagttccggtcggaataaaggataatatttccacaaagggaataaagacaagctgtgcttcaaaaatactgggagattttaagccgccgtataatgctgctgtaattgataaattgaacaaggccggcgccgttatcatcggaaagctgaacatggatgagtttgctatgggcagcacatctgaaacatcgttttatgggccgacaaaaaacccgtgggatactgaaaaggttccaggaggttcatcaggcggagcggctgcagctgtttcagcaaaggaagctccatacgcattgggctcagatacgggaggaagtatcagacagccggcatcattctgcggcgttaccggaatgaagcctacctatggagctgtttccagatatggccttatagcttacgcctcttcacttgaccaaattggtcctgttgctaaggacgctgccgactgtgccgctattatggatgttatttgcggaaaagacgaaatggacggaacttctttggaggttgaacataaagggtatctcaactcgctgtcaggtaatgttgacggtttgagaattggaatacctaaacagtgttttggcgacggtcttaataaagatgtgaaaaagtcagttcttgctgttgctgagactttgaaggaaaacggcgcttctgttgaagagtttgacatgactattattgattatgttgttccaacctattatattatagcgtctgctgaggcaagctcaaatctttcaaggtttgacggcgttaagtatggattcaggtctgaaaattttgatgatttaacagatttgtatatgtcaacaagaagcgagggattcggcgaagaggtaaagagaagaatacttctcggaacttttgccttgtctacagggtattatgatgcgtactacaaaaaagctctgcaggttaaagcccttataaaacaagcatttgacgaagcgtataagaaatatgacgttatacttttccctgccgctccgactactgctcctaaattgggttcaagtttatcagaccctctaaagatgtatctttcggacatttataccgtttctgttaaccttgccgggcttcccggaatcagcgtgccgtgcggatttgatgaagatggtatgccgataggcgcacagctggtcggcgcgccgcttaaagacgatgtaatcctgaacgcggcgtatacttatcagagtttaacagactttcacaaaaagtcaccggatagttttgtaaaggaggcgaagtaatatggcatgggaaaccgtaatgggtcttgaagttcatgttgagcttgcgaccaaatcaaaaatattctgttcatgcacaaccgaattcggcggagagccaaacactcactgctgccctatatgcacaggaatgccgggtactttgccggttgttaacaaacaggtagtaaattttgctatgaaggcgggaatagcgctgaattgtgatattacccgatacaataaatttgacagaaagaattatttttatcctgacctgcctaaggcgtatcagatatcccagctgtatctgcctatctgtcggaatggacgagttcctatcgagacagaaagcggagttaaaaaggatataaggattcatgaaattcacatggaagaggacgccggaaaactgatacatgatgagtttaacgacgaaactaagtgtgattacaacagatgcggcgttccgcttatcgaaatagtaagcgagccggatttcagaagcgctgatgaggttatcgcatatctgtctaagctgaaatccactctggaataccttggagtttctgactgtaagatgcaggaggggtcaatgcgtgccgatgtcaacctgtcagtcagaaaagtcggcgaggaagaattcggaacaaggacagaaatgaaaaaccttaactcgtttaaagctatttcaaaagctatagcttttgaagcaaaacgccagatagacttattggagcgcggcggaaaggtcacccaggagacaaggcgctgggatgataataaagacaagagctatgctatgagaagcaaggaaaacgcacaggattacagatattttcctgagccggatattccgcctattgatatagacgacgagtggtttaattctattgaaagcagtttgccggaacttgctcctgagaaaaaggcgcgttatataaaagactttggactgccggaatatgacgctaacatgataacaggtcagaaagcgctggctgacttctttgaggagacaacggcgatatgcaataaccctaaagaagtttcaaactggattatgggcgagctaatgagaaaactgagcgatgagggtatagaagccaaggatatgaagctcacgtccaaagctcttgccaagctgatagagctggttgataagaaaacaatcaaccgtaacaaagccaaagaaattttcggaatcgctttcaatgaagatttggatgtagaaaaatatgttaaagataataatctagagcaggtaagcgacgaaggattggttcttgatatagttaagaaggttattgaaaataatcctcagcctgttgttgattataattcaggaaacaagaaagctataggatttttgatgggtcagtgcatgaaagagttaaagggaaaaggcgaccctggagtggtaaataagctgctttcacaagaactgaataaataaattattatttataaaaatacaggttagaaaaagctttttaaataaagtaaatactattatttaaaattaaattttgttagaatttaataaatattataaaaagttgtttaaaatttaagatatacaaaaagacaatggtgtgaccactaaaaaagagatttttaaagcgtagcagttttatgactgctgcgctgtttttatgcagacaacttgaatttattatacgaggttacctgtcttttctcagagcttgacagcttatgtcataattccgtgccaatatatttttaagtaaaattttacttttataaaatatgcgttttgattatataaacatagttaataatatttatacttaaattgtgaccggatttttaagctggtacggttttagttttcaaccgcttaaaataattaatcttttatgttaaaagaaataatacatatatatttatcggtaactaatttgattgacacaaaaacttaccaatggtataattaaaaatgaaaaaacaaaaaatattataatacgaggtgagaaaatgaagaaaaaactgctatctttaatgctggctctctctatgcttataagcacaatgccgtttattgtcattgcagaagaagacggcgcaggttatgcaacaaggggatatgttgccgataagcttttgtctgtttcggatgattataatgcaggaataaccagaggagacattataaaaggatatggcgacggtgacacaaaagacgaccagtatattacgcgttccgaggctgttgttatggccgaccgtgcttttggaaaaatgcctgaacctgataagaactttaaacgtatcagcgaaactgatttaacattttctgatgttcctgactgggctgaagacgctgtcaataatttggcaagccgcgggatactggttggaaaaggtgatggattgcttggttctgaggattttataaccgaggacgaggttactttgattatccgcaggttatattatctttttgggtctaatttaaaggatgactttcaggcttatatcaacaaagattattataacactgcagaaatttctcaaggcaatgtagtaacttcatcgtttcatgaagttgacgagagaaatgatgaaataatctcagatattattaacaattatttgtcagaagaacagcctgccggcagcaatggtgagataatagctgatttttataccagtgttaaaaacttaaacaccggcgagggaactgaacaggatattgaaccgctaaagccgtatcttgatgaaattgataaaatagaatcgcttgacgagttagacgctttgtcaacaaaaattgtaaaagattatttagttaccacctttgcagcttttgcgattgtcgctgattttaaagacaatacaaagaatattcttgcttttgggacgtattcgccgagccgtaccaaagcagattatgaaaatgaagatattatgaacagctataaagattacttgacaaatatcttggttctcggcggcgaagacaacactaaagctgcagaagatgttgagaagtttatcgcttttgaaaaggatttatctcaatatgtaatgtcaaaccaagaagcttctaatatagataatatttataatctttatagttattcagagctgtgtgatttgttccctgcatttgattttgataagcttttggaagcattaggtcttcatccggaagataatgttttagtcacaactccaaaggttatggaagcgtttgcttcatatgttaatgacaaaaacattgatttattgaaaacaatacttaaaatttctgttttaagtttgggttctcagctggataaacgttttattgacgcagcgaatgattttgagtcggattattttggaatggacgttacaagtcctgctgaggatatagctttgactactaccaaaaatactttatcttcatatttgagtgaagaatatataaaacggaatttttctgatgagactaaaaaagatgttgaaaatatggtaaatgagtttatagatattttcagaagcaggattgcaaatctaacctggatgggtgaagccacaaaagagaaagcaataagaaaaatcgacgcaatgtctgttaacgttggttatcctgaatcatttgaggattatattgacgatataacggtttattctccaaatgaaaaatacgcatattttaatactatgaacagtataagaaaatccgcgtatgctgatatagctgaaagccagggaaagcctgcagaaaaagcagattattggagcgtagttccggtatataccgtaaatgccggatatatgcaaactgataactctattaacttcccggccggaatacttcaggagccgttttattattctgatggaaagcctgaggaaaatttggggtctatcggtacagtaatagcgcatgagattacacatgcttttgataataacggcgcaaaatttgatgagtttggaaacgctgcaaattggtggactgaagaggatttagctgtgtttgaacagctttgccaggatgttgttaactattataacggatttgaatccgctcccggaatccaaacagacggcgaacttacaataagcgagaacgtagctgatattggaggaatggcatgtgcgcttgacgccatgaaaaaactcgaaaatcctgattataaactgttttttgaaagtaatgctaagctttggaagataacaggtcagcgtcagtatttagagagtctgagcacaatagatgttcattcttttggaattgtcagagcgaataggcttgctgcattatttgatgagttttacgaagcttttgacataactgaagaagatggaatgtacgttgctcctgagaacagagtatcaatttggtaaaatagcaagttatttaaatccgcctacaattgtgtaggcggatttttatattttcttattataataagaaaatattacatagtatattgttgaaaaagattattgcaaaatttttagttttatatttattattataataaaaaagttattcacagccctccgatgcttgcaaaaccatatttcatataataatttattttagaaatattattctgtatacagagtgtttttagtgaacatcgggaggtgtgactgtgaccccacctaaatggtgggtgtgagcccaaatatctctttattccttaaaccttcaatgtcaataatatgacttagttgtgatgtttcccacctctggtgggtgtgatacaaaagtgactttttttgtcatagccttaaacgtcaataaattacttagttgtgatgtattgcgcatttatgcgccgcttcaggtgagctgtcatcttacgcggagcgtaaatatacatagaacagtttgtcataatccgttttataataaactgttccacgactgcgcgccttacgcgacgtacttcgtacgtcctaccgaagcttacaaaaccacactttttataatttatttagaaatattttttatatgttgttttaatgattatttgaaggtgtgcacctatcttacaggtgtagacaaagtcctgctgaagctagcaaaagaacattttttatattcatttttatattaaataacattaacatttctgtgtaatgatttcggccttttttatagttttatagaaacaataaagatgatacttgtttaatgagctgtcggaaaaattatcaattatcaattatcatatatctaatgaggtgtttactggtttttataaatgtctatttgatattgcaatttacatatataaatttttgaaaaaatatagaaaaaagtcttgcatttataatttggttatgatatactatttcggtgtttgggctaagtttgtccaaattatataaaatacacacgctttgtgatttcatttgatgtgccggtattcccattccggttcttatgaaagctgagcaaggcggaggtataactttatggaggtgtaaaatatgggagtagtacaaatgaagcagttattggaagcaggtgttcattttggacatcaaactcgccgttggaaccctaaaatggccgagtacattttcactgagagaaatggtatttatatcattgatcttcagaagacagttaagatgattgaggaagcatattactttacccgtgatgttgctgccgagggcggaagtgttctttttgttggaacaaagaagcaggctcaggaagcaatcaaagaggaagctgagagaacaggcatgtactatgtaaatgcaagatggctcggcggtatgctcacaaactttaagactattaaaaagagaatcagcagattgttccagcttgacaagatggctgaggacggaactatggaacttcttcctaagaaggaagttatcaagttgaatcttgagaaagaaagacttgaaaagttcctcggcggtatcaaaaacatgcatgacttaccgtcagctatgtttgttgttgacccaagaaaagaaaagaatgctatagctgaagctcacaaacttggtatcccggtaatcgctattgttgatactaactgtgaccctgaagaagctgattatcctatccccggcaatgacgatgctatccgtgccgttaagcttattgtttctacaatcggaaacgctatccttgaaggcaagcagggcgagcagatggaggaaactcagaacgaagaggttactctagacgttcttgacgaataatataataagaagttttttacgaaaggaagaataaaaatggcatttacagcacaagatgtaaaaacattaagagagatgacaggctgcggaatgatggactgcaagaaagctcttactgaaacagacggcgatcaggaaaaggctattgaatatttaagagaaaaaggtctttcgaaggctgccaaaaaggcaggcagaatcgctgcagaaggtatggttggttcgtttgtttatggagacacaggcgttgttgttgaggttaactctgaaactgactttgttgcaaagaatgctgatttccagaagtttgttgaagatatagctaagacaattgctaataacgctcctgctgatgttgaagagcttaagactttgacaatcgacggcggaagccagacagttggcgacgctttgaccgaaaagattgctactatcggcgagaatatgaatattcgtcgttttgagacatataagggagttaaccagtcatatgttcatgccggcggaagaatcggcgttcttgttaattttgaagtagcagacgcttcaaaggctgaaacacctgaatttgttgagatggctaagaatgtggctatgcagatagctgccgctgctcctgaatatttaacagaggaaactgttccgactgaggtagttgagaaggaagcagaaattctgaaacagcaggctttgaatgaaggaaagcctgaagcaattgttgataagatggttgcaggccgtataaagaaatattacaaggaagtttgtcttgtagaccaggcatatgttaaggaccctgatatgagtgttcagaagtatgttgatggtgttgcaaatacacttggaacagaaattaagattgcaaaattcgctcgttttgaaaagggtgaaggaatggaaaagaagcaggataacttcgctgaagaagttgcttcaatgatgaaataatctaattgattagatattaaaattaactcaacattaattttgcgcgctgtgagataatcacagcgcgttttatattaattttttatatatgttttgtgaagcgagtatatttataatatagttcattatacaatattttataaaataatctgacctcgaatacagaaagtttcgaggtcagaaatactattcaattgtcacagtttgactttcctcgtcccaagtgatttttgcgtccaagttttcaacaagaaatctcaatggaacaaatgtgcggtctttatataggtatggcggtgaatcaagtgtttgagctttattgttgacatatgcaatattagagccgagttttaattttatgttattgttattagagtgaattgtaacagtctcatccagttcgctccaatcagttttagcgccgataaaatctgcaacaggccgtgcaggtaacatggttctgttgtttactatctgcggcgccgaacctagacttatgtctatatttccaacttttgccgtacctttgtcaattgttaataccatttttcttttaatattatttaaagcagcaaaatggtcatacatatttcctattctgtcacagttcaaaaaaattgtgcttgatactttctgaatactttcaggaagttcaatatctgataaacttgagcagtttccgaatgcttcatcatatatatacattaatccatcatttaaagtaacacttttcagagaagtacaatttttaaatacttgataccatattgattctacgtctttaggaataatgatttcagtaagggagctgcaattttcaaacatatatgagctgatttctttaagaccctgaggcaagttaacttcctcaaggctgctacagtcgctaaatatgccattctcaagttcttttacattatttggaattgtaatttttataagagaactgcaattttcaaacatatatgaaccgattttttcaagactttgcggcaagttgacttccacaagactaacacagtcgctaaatgcgtcactcctaatttcttttatattatctggaattgtaatttttataagggaactgcaaccgctgaaagcactatatgagattgaagttaaactatcaggcaattggattgattctaaattagtgcagttgctaaatgcgcagttttcaatttcaattatattatcatttattataatatttttaagactgctgcattcagaaaacatgttgccgcttattttttttatatttggaggtaaattaatattttcaagtgctgtgcatccgttgaaaacatacccatcaatattagatacagtatccggtatttcaatactttttaaggaagaacagcagttaaaagcattatttcctattgatatcaaactgttcggcaatgatatgctttctagttctgaacaattttcaaaagtatatgattttatttctgtaatcccgtttgggacaacaaagtcttttagtgtgcagcagtttgaaaatgcgttatcttcaattttaactatattatttggtatatctatatgttttagtgaagaacatcctgaaaatgcatatgaatcaatttcagttactcctttgggtattataatattttccaaagacgcacaattatgaaaggcaaaccctcctatgatggttacagtctcaggtattataaaatcagttagcgatgtgcatccgctgaatgttccatccaattccgttaaccaatttggcaatgaagcagatttaattcctgtgcatccactgaatacattttttcctaaagttgttaccgaatcaggaaccaaaacagactcaagaccggtacaggatgaaaacgccgaatcaccaatggatgtgattgaaggtggaatatacagatttgttaaagatgaacagccggaaaaagctcctttatcaatagtattcacattaagcggtatattgatttccttgagattcttgcaccctgaaaaacaatctctacctattttggttattccgcttgggatatttacggaagctagattggagcagctttcaaatgcatattcatcaagaatagttacattttcaggaataacaatttcagtaagaccgaggcaacataaaaatgcaccttttatggatgtaacgctttcaggtattgttatgctgctcagactagaacagatttgaaaagagttattaagttcagtaagactgttggaaattttaagctctgttgctgattcacaatatctaaacgcatattcacctaaaaaatatacactgtccggaatatcaatatattttagtgattgacagtttgcaaaagcgtgaccgcctataacttccaagccatatggtaaatttatttctgtaaggtcaaaacaacaattaaaagcctgacctcctattatcttaagtgtgcttggcaaggtaacattttttacatctgagttttcaaaagctttaaagtcaagcttagttacgccttcaggtataataatactgttaagattgtgcgtgccgtaaaaagcctccatacctatagttgtaacaggcgatccattaatctcggatggaataactatatctgcagcgtctttgttgcagccggtaatcgtaattccataaccatttctttcatatgtcaaatcttcatagctttcagcgcaaactggaaatgacaatataaaagatatagataaaattgatagaaataataacataaactttttcatattcatcatccttatatatttttaatatattttatcatttaatttactatatgtcaaatagtatttggaaattatataacatgatgaaaattatagtgttttaataaaaaatggaataattataaattaaagggtaaatattttctctctcaaatgaaaagttgggctcttaaatttttaacttcagcgtaattattttctgcttcatagaccaaaattttttgtcatcagtcgtttggatcataataaaaataatacattatttttattatgatggactgtaatttgataaactttatcttcaggtaaaatattttggtttaaatatatagttattgaaatttgaaatataaaaatttatttatattattttatatataatacgatatatttcttcaatttattttctagtgatgttctataacatatatgaaataaatcaaattctacaagtaaaagtataaaagataaatagtttaggattacagtttcggccggcagttagtttccgctaactattggccgaaaaaatataattacgcgagtattactgaagaattgattttagagctgtcacaacaggactcggagatttaacgaacgggaagtatgtttcgcagatttttgattaacagtgttaatcattttatgcgaatatgtactgataaatactactattaaatcctgttttattaccttattttcgaagtagggcggcatctgcgtaaaaactttagccttatatttgtatgatttgcaaatatctttgtatctggttgccatacggtcgtttcctccagttaatacaatactcataccttttatcctttttgttatttactgaatgttttatatgtatatttgcccgtactaggcgggcagataattttacttattttttatattaaacgctgaaagtcccggatatacggcggaatcaccgagttcctcctcaatacgaatcagctggttatattttgcgactctttcagaacggctgggcgcgccagttttgatttggcatgtgttaagggcaaccgccaaatctgcaattgttgtgtcttctgtctcgcctgatctatgtgatgaaatagcagtgtatccggatttgtgggccatttttattgcttccagagtttctgatactgaacctatttggttgagcttaataaggattgagtttccgcatgcaaggtcgattcccttttttagacgctctgtgttggtaacaaaaaggtcgtctcctactaactgaaccttgttcccgagttcttgcgtcagcttctgccagccttcccaatcttcctcgtcaagagcgtcttcaattgaaataataggatatttttccacaagttttttccagtgtgctattaattcttcagaagtaaattttgttcctgctttcggaagaatatattctccgggttttgaacctttccattcgcttgtagccgcgtccatcgcaatcataaaatctttttcaggttcataaccggcagctttaactgcttcgagaatatactgaatagcttcctcatcgctggcgaggttaggagcaaatccaccctcatcacccactgatgtggttaggccttttgatttgagcaatgacgcaagggcatgaaatacttcagcacaccagcgcagggcttctttaaaactttttgctcctacaggcattatcataaattcctgaacatcaacagtattagcggcatgtgctccgccgtttaaaatattcatcatcggtacaggcagaacattgccggaaattccgccccaaaatttgtaaagaggtatatcaagtgaaattgacgccgctctggatgccgctattgatacggctaggattgcattggcgccaagttttgatttgtcttttgtgccgtctgcggctatcatggctttgtctattgcgtaaatatctgaagcgtccattcctgatatggtttcatttattatcgtattaatgtttttaatagcttttgtaacgcctttgccaaggtacctgtctttatcgtcatcacgaagttctaacgcttcaaactcgccggtggacgcgccgctcggcgctgttccgcgaccgatagtgccgtcggcaagatgaacctcagcttcaacagtaggattgccgcgtgagtcaaggatttctcttcctataactttttcaatctgtaaatattctttcattctttttgctcctttcaggatattatatatttgtgttatatttatttttgctgattagcaaaggctaaatggcctgattatgtcatgagtaatatatttgttaatattttaaacacatactgtatatggttggagtattttattatttattatatctgctatgttggattgcattatggtttggatgatgctgacgctgaggggggcttttgatacatttaaaatattttaatttcttttaatatttaatattgccatatttatcttattttataaatttactttctgatatgagaaaataatattgttttatttaaaattataaatagcaagtgatgttattgatggcgttaatatatatttaaaggtctaaattgaattaattatttaatataaataaaatttgtggctgcgcgcctaacgaggcagattacatctgccctgccgaagcttgcagaaaatattttttatatgagtatatatttgtaaaaataaaaccatctgtaatttaggaactaattagaattaattatttaatataaatcgttttcgccagcgatagacatactgacgatttaccttatagcgaatggcagcctttgtcacgccgtgtttaaaagaatattcaattaatacttgtctaaatctcatagtttgtgttatagtgttcatatacggaaggctcctttgtgtatgtgatattgtggtgatataactataacacaatttatgagttttccgtattctttttttctctttgtaacacatctattgtaatcctacaatataaatgagaaaaatataaaaaagatattgacaaattattaagaatagtataaaataaaatagttgttgatttcaacgacgtttattatttgcggctatggcggaattggcagacgcgcatggttcaggtccatgtgaaagcaatttcatggaggttcaagtcctcttagccgcaccaaaatttgaaaatccgaaccttataccaattggtaataagttcggatttttgctttattttagttaattaaattttaatattattatataacttatggacaatttgtgacatcttttgtcaagaggtctttaacattatttgttttgatatagattattttttagctttgcgttttaatctgccaattaaaataatatcagcacgagaaaatcaatatacgtatatatttgtgtattgattagggagagtttacatatttaagattgcaaatttgcaaatttgctattcgtttgatataatataatcagctaataggggcctatatgtccttgttagaaatatcaggcgatcttattgtgcattggcagacaaacagaaagcggatatagtaattggcaggactgatagggacgcagcataacaattaagtcaaattgaaaacggaaaaatgtaaaacaccagcttcgatatccggataaggccggaaaaagggtttaggacataaacaaattatatattggggctaaccattattggccgccttaaaagttttgatatatataaatttggtttgtctgaaaacgtggttcaaaatttatgacatggacggttgatgtacatatcttgaaccgtttgccggaatacaaaagttttccacagcagtatagctgataagtgcttagttcaagtacatgacggatctgagaaatatagtgcgaaacgaggtcatggaactgacattgcctgcttcttgttcctgtgaaagacagtatagtgtaaagctgctctgaaattgttttttatgtaatatataatacaccaaatttgtgattttgtatggtcataagttttgggcagtaattttcataaagaactgtaactttattttggtatatttgaaaaacagctgtggagcaacattacggccaattgcttaaaaggaggattctaaatgaaccaatttattgaaacgttgacaagtaaagacaaatgtttggagttacccgaagaatatgattatttcggaaaacttatcgaaagctggaaactcaattataccgaccgaaacatatcatgctcagttaaaggagaatggcatttttcatgggttcttgagggtatggcaatacaagatgttattgttttaccctcgcgcgatacaaaaactgaaattccgcatccactcaccgaatacggcacaacgcttcgtgtttacaatccaaatacacatgcttgggatattgcctattgttacacaggagaaattatacggctagaggcaagaaaacaagacgatatgatagtgctcacaaacattgatgataataagaaaaaatgggtttttgtcaagattgaggagaatacttttcattggcaaaatattaccataaaagaagatggcgaatggcatataaatgcggatatatatgctgagcgaataaagtaaatacaatataaaagaaacttttagacataaagataaagaatatcagaaaaaacatagtctgatacaaaattgtatcagactttttgtattatttcttatataccgattaatttgactgtattacagagatataaaggtattaaacataaaatctgtcctaagtaataattacatattaaactttcacgggttttagatttatgaatttcgatttgcaaattctcaggttagagaaacacgtgtttttttcagcttaaatatgactttagactttagattttatattttcagagacaatattgacgaatgcagtatgttttgatgctgctgcgcatgacaactattttgtgttgggaaataaattcatatttagcagaaaaataagatttagatgatattaccatcgtttattgtaaaaattcggctgctgtttttttgcggatttcagcgaatgagtaaccataataattgtttgtacgatttctttattaatattattcagtaattcaattcttggctgctttattgttggattgctgtctgcatagataatatattttcaaagtcctgtgtgaaagttatagcccaatcaccgcgtatatttttaccatttggagctgacattgtaataagtaatgcaaaaatacagaatacggcaatgagagttccaaaaagtgaaagataaatattaaatatatatgaaaaatactgtggtaaccggattctttcatataatcagcccttttcttttatttatacctcaagccttttattgttacaagctgtttcggactttacggaatattctctattttttctcatgtatgacgtatatacaccatgattgtattgtcacaaataatactgtattctccccatacttgttcatatagccgttccttgctaataattttatcggcgttttccattaagtaggatagtaacaataattctcggccggtcaagtcaactttttttcctgatttataaatacggctgctttctttatccaatgaaagacagtcaacagttaactgtttgaggttatcaagcgtatttactgattgatattgttgacggcgaatttgtgacttaatgaggtaaacgatttcacgcggactaaaaggtttagtgatataatcgtctccgctgcagaagagcctggtgttttgtttatatcatcatttcttgctgataggaacagaattgaacaaaaagaaaattcacgtattttttatacctcaataccgtctatatccgtcagcataacgtctaagacaataacatcgggctgatattctttacatattctgattgcgtctgtgtctgtatatgttttttatatttttgaaattgttttaatacagagctttttcaaataaacctacaatatacttttcgtcatctattaataatattttattattcattagttataatgtcattttttttcgttaagaggcctattattagaaaacttttctgctttctttggtattagtgcatgttgcaagtttacaaaacgacagatatgcgtttgctatttatagtattttatgttcttgttgttttgctgatttaaggtaatatgaaacattaatagttttttagtttcgattatatgcgggcgcataaataaagtcaacagaaaatataaaaattatttatttagctggaatgtgattgacggttacaaagaaatgtggtataataataaaaatagctattgattatggtttttgatgtaaagttgaatttaaaataatagcttgattttcattattgcagtgtttttttatatatatagtttttgaggtagttactgtatatcagcagtcaatgctttgattttgctatattatttaagttcagtaatagcagttaaaatagcattttatttaatgtgcgggtgtagttcagtggcagaacaccagcttcccaagctggatatgagggttcgattcccttcacccgctccaaaaaagcggcaagcatttaatgcttgccgctttttattatgaaataaaacagagctatttgccattttaaatctaagagattattatttttctcatacaaaccaaagtttttgtcatcttttacgactaatgctggttttgacaggctgttttcagccgagatactcatcataactttatctttaaatttaaatatacagtatcgcaggatcccgctaaatgccttgtatataaaagtatctgcaatatattgtttcacacttttctaatattaaataataacttttattaaataataacttttcgagttctttttcgacaaaggtgtggtcacgaaaatctaattttttcccgttaaatgtatattttcaatatgttcaacaacaaattccacttgttactatctcgctattattacattgcccaaatactttatagtaaacgcaccgtcaaaattaaacagcttaattattttcctcaattgcttctccgaaaagttttcattttacagttgattacttaaagtgttttctctatatcatcgtgtttccgcaagtcatttacctttatatttcttttaatcaaaggaattaattttaaaagccataacaatataatcaccccattttgttttatacaaggggtgattatattgtatatacattaaaatcaaagaaatatataattactcaattgttttaatgattatttctctataagagtaaatttccatttacagcagcaggattcgtctgtaatatcaggataacagctgatgcagtcacagacaattcttttatcaataattttggcaaactctgaatactcaattattcctacagatttacatggatggtaaggcatattttttcttaatcttgcagtttgaaccctgcattctaaagtgctgtatatcaaagtattgtcttttattataagttcatcccggtttatattggcataaaatctaagctttaatgctttttccaagccttgcagacccgggtattcttcaagattaagaaattctttgatacgttttgcttcaattgctgtaaaatgcgtccacacttcttcatcacggcacatggcttcctgcataccatatttattctcaagtgactgaaaccataatccatccatagccagccaattttttgaataagcttcaatcaaagttattagttcattttttgataatttttgcagtgtttctttatttaacatgagccgctcctttaatatcttattttagaatataccaagcaaatgctgcattaacaaactaacggcaccaatcgctatccagcagcataaaccaagaaatattggctttcctcctgattttacaagcttgactatatccgtgttaagccctatagccgacatagccataacaataaagaatttgctcagagtttttaaaaagcaaaatactgcttgtcctccgtcatgaatcattccggatggaaagattgcaaagaaaatggtggttatgacagaagctaagacaaaatagaggatgaagaatgggaaaatcttttttatgctgacctttgttccgccggccgacttttccttttccgttctccaaaaggcaagcaccaaagtgattggtattatagcaagagttcgggtcagttttactattgttgctgtgtctaaggtgttgctgccatgtataccatcccaagctgtcgctgctgcagttactgatgaggtatcgttaactgcggttcctgcaaacaatccaaatccttcattagacaacccaagcatggaacccagtgttgggaaaatcaatgcggctatgatattaaataaaaatataaccgagattgactgcgctatctcctcatcgtttgcgccgataacaggagcagtggcggcgattgcagaaccgccgcatattgatgaacccacacctattaaggttgcaattttgggatgtaattttaaagccttatataaaacaaaagatacgattagcgatattgaaatagttgataaaataatcggcaatgactgagctccggtttttgctatacttccaaggttcataccaaaacccaataaaattattgcgtattgaagtatgctttttgatgtaaatgtgattcctgattgggactttgttttattcttataaaatatagttactaccatacctgctattattgcaaacacaggtccgcccacaatcggaaatattaatccaagtatgtatgcagggattgcaattaccaaacaaattaaaattccaagccagttttctttaacaaaattcaagtttactcccccttaatttagtgtttattctattgcagcagatttatcatattctttaaattgcctttgcttttcaaatacctcaggcagttttttgacctttataaaatatgaaatcataaacagcgtgcaggcggacagccaagctatcggcccggatgcgcagactcccaaatatccataaaattctccaaacatacctgttagtgtgtttgccagcacgagtgagagaacaattcgggcaataagctcaaccgcgcttccgcacagaactattccggaattccccattccctgaagactgttgcggtatacaaataagaggccgagagcaaaataaaacacacctgctacataaaaatagttttgagtatataatgtcacgctttcacgcaaatctccgctggttcctgaatcaatgaatattcctgcgatttgtcttgaaaagattaaaacaagagccacaattataactgtgaatcccaaaacaagcaaagcgcatttatttactccttcgcgtattcttttttcacgcatagctccgtaattttgtcctacaaatgttgccattgtaaccccgaaagaaatttggggctgactgacgagctgctcaattttattagccgctgtatagccggcaataactgttgagccgaatgagtttaaaacagcttgaacaatcattacgccgatagcagtaacggacatttgaaatgccattggcactgcaagccctagatgtctgagagaaaattttgagtcccacttaaaatcgctttttttgaggtgcagctccgggaactttttgccgacgtatagaagacaaagaagcccggaaatagcttgagctataatggttgcaagaccggctccggcaactcccatatgaaagtttaatataaatactaaatcaagaattatattaataatcgaagagattaaaagaaaatacagcggtgttctgctgtctcctaaagcacggataacacaggatatgtagttgtaaaagacttgaaatacgattccggcgtatattacaataatataattatacgaatcgtttataatattatccggcgtgtgcataaactgcagaagcgaccttgccgaaagcatactgactgctgttaagaccacagaagccatcgttgccaaaataagacctgtgccaacgcttcggcgtactccgtccatgtcattggctccaaatctttgagctactatgatagaaagaccatttgtaaaaccaagtgcaaaacccacaattaagaatgtaatcgcaccggctgcgccaactgccgcaagggcttcaacactgatagtccgcccaactataatggtgtcaaccatgttgtaaagaacttgaaagatgttcccgataagcagcggtatggtaaatttaataatgtgtttgataggacttccgacagtcatatcgtttgttaaagcatttgccatttatttcattccccctcaatataatataattttcaaacataggtcttattaatataacgctacaaattttgtatgtcaactataaaactgtacaaagtttctataagtacaaatttaaaatattattgaataaaaagaccgtaataaaagaaagagaatatttaatttatcaagtattttaaagtggaaaaatgttgttaatatcattttaaacaatttaaattttctgtaaatattcggattatgaagttgttgatatagctgtttttgtaataaaaattttatgcgcttgccggcattttattcactgctgatgtatccaatataattaaatataaatatgcaccgccaaaagtaacttgcttttggggtgcatattaaaatattatatttaatttttaaattaaaaatttattcttataggcctgtctccgagagtgagcacatcattatttttgatttcgacctgatgtttaagaggcttgccgtttaaaagagtaccgttggtggaattgttgtcttcagccataatcttctttccgtcgcgaatcagtatacagtgtaccgaggaaaccataggcttattaactactacatcacactgaggatttctgcctactaatatttcatcttctatagtcagagtttttgttttattgttttcaataatagttacgtttacttttatttcgcctttactgttatcagctttatttttgtcagtgtttgaagatttattgtcacttttttctataggcttagaagctttgggttcagaacctttttcacttttactttcttcattatcattaatattatcttcttcgtcaacagcgtcttcgctttcaatgtcagagttgttatcttcttcagcgtcttcaacatcttcaacatcattttcttcaagttcaggggtgtttaagtgtctgctcgattccatgtttttataatatagaatttcatcaagttcatcagtttgttttttcttaggattcataaataatcctaagcagattagaaccatagcgataacaaaaagcgcgccggcgatgagtaatatgtcattaagtatattcatatggcagttctcctttaaaatattatcgtgatagcgctgtagctatcttccggctcatttttcttcacaattctaatcatctttctgagccattcagaggaagatttcgaacgttttaaggttttttcaacctggcgctcagtaatcttttcccaaaacccatcggtgcaaatcaaaaccgcatcaccgcttctgacggcgattgggtcaattgtttcagctccgcacatcgggtcggcacccaaataagcggtaagcttgcgcctttcagaacttttacgaattcccggaaaacgaaattcacctttactatgggctaaataagctaaagaatgatccggagttatatattgaagataattttcactgagataatacattcggcagtttccgagatgaccgcttatcacacaattcccatcggttagcacaacggcggcggaggcttcataagtcttttcttcaccattgtttttagacgcgtgcgtaagatcccaaagtttttcatctgcgtttttaaaataaccggagatagtatcccgggttatatcggaagtatttttaaaatcagataaaacggaatcaattacaagttcagaaaccttgtccccgtttaaaccgcttaaagacccgtcacatacagcaaaacaaccgcagcccctgtcttcaagcattccgatataatcacagtttatttccatatcgcccgaatatcgagcggatgaaatatccataaatcattctcctatctttataatgactgtataagctaatatttattaatataatattttattagcaaaataaaccagtcaatcaaaaacaacatattctcattatactttatattggatatattgtcaacacaaaatgcggtggtctaagccatattattgttcagattgaataacaaattaagacaaaaaaagaccggctgaagtccggtcttttttatattctaaattaaggctccgcgtatcatagcagtgaattaatttttttataagttttattcttcaactaactcaacaatttcaacattgtcaacgttagaaatcggcgggatacttcttgtttctattgcacttctgttgccttttaccttagagcctactgttaaatcagcaagcttgtagattcttttgtcattgccgcgggttataacggtgtcgtcatataccataagggcacgctcgattccgttgtcatctataattatgcggtcttcctcaacagctgttatagtaccttcatatggtacagaatcgattacatcgggagcatcttcaccgttaacctctccggatctctcggttccgacagtttcaatagaaatagcggttgtctgaggcggaaggctaagagtcattgcggcgccgtagcctattttgagctcctgtccgtcaacaagtgtgttaaggtcaagttccttatcgccgtcttttaaaattgtatcttcgcttactctgactattacttcacccaatcttgcatcctgaacagacagaacgctgttttcatcttcacctttttcaatagagtttaaggtaacgtcagcaggttcaacaactataacatagtcgtctccgccttcgtatacgtctacgcctacgaggtcggttaagaattcaacaggtacataagttgtttcaccgtcaaccaatgaaggagctattccgaaagaaacaggcatcatttttgagaaataataagagtcaagccctatattcattccaaactcctgagcgcctcttaaacactggattttctggtcttcttcattccaaacaacttcaaagtttaagaactccatgacatatctgagcggaaccattttgtgtccgtcaacgtttacaaccggaacagcaggaatggtagctccgttgtatgtaacctctgactcagagccgttgttaaccgcttcaccgtcagttgctgaagtagttgtatagtcaaggttagggtcggctgttttttcaggataatattccgcaaacacagcagtgccgcttgcaagaactccggcagcaactaatgtagaaataatcttttttgtatctaacttataatttttcataatatcctcctaatcaatttacttaatgttttgtttacagtaccttagacgaaagatttttataaaagttacagatttttataaattatttgtaattcgtaatatttaccaaaaaacacatgttatatataggaaataagtatattttaagcataaaaatacctgtgctgtaattggcacaggtattaaaaagtaggttaagtagattattatattaatattggctgaagctgaattcccttttgcgctgcctcaaccgattttggtatcagcttaaagtcggaaaccagcgagttttctttttctgagtaattatcctgtccgaatgggactatataaatattttttcttgaaagaagtgttcctatgtttcttgcgctgccgctgagaccatcatttgtggaaacagccacaactatcggtttgttatttctaagatgggactttgctgctaaacacactgcagtgtcggatatcccgtttgctaatttggatatggaattccccgtgcatggggcaatcacaaggacgtctataagttttttaggtcctatgggttcaacgtctgttagtgcggtcataggttttttaccggaaatatcatggaccgcgtcgtatatttcctttgctgttccaaacctcgtgtctgtatttgcgactgccggtgacaggatcggataaatatccgcgcccatatcagcaagctcagccataacggcaagcaccttttttatcgtgcaaaatgatccggttaaaccaaaccctattttgacgccttttatcgtttcgtccatataattcatcacctcgcttgctcatttaaaatattattaattgtgtcgcggattatgtttcctgccgtgagcggagcggtttttcccggcagcgataacgcccatattacatttctgcccaatcgttttgctgactcaaagtccacaccgccgggtttgcttgccaaatcaattatcagacagtcttcacggagttgtcttaacatacttccgttgattatcattttaggtactgtattaaaaactacatcgtattttcttgggtcagtgagaggcttagttatgtccgcgccgttatatccataggcttttatatatgctaaatcactctgtttcctaaccgccacagtaacatttgttcccagtccgcttagggtatgacataaaatctttcctacgcggccaaatcctgtgcataaacagttagaaccatgcagagtgacaggcagttcttccattgcgattttaacagcgccttcggctgttggtatggcgtttaagacggcaagttcctcacgtttcatatagtccacaacaccagcgccgtttagatgggacaaagctgtaagcctctcgtcaactttcccagctaaaatcagtttcttatccaaaaggatagggggctcgaatagatcactgatttttatttttgtttctgataaaggagtattaatattctcgttatctaatattgatgaatatggaaccggaagtacaataaagtcagcattgtttacggcctgtgccaggtcgttgcagacagtaatattctttttgcctaaaagttcatcactgtctataccgataacatttactgaatatccgtcttttgcaaatccaagtataacgtaaatctgccgtctgtcgccgccgataaatgcgaaagtagaatacttgctcatcttcaacacctcaatgtatattatgttggtatatgaatttggtgaagatatttataatcaaagttttatttaaaaaatttcaaatttttatattttaaataaacacatagtataatataattaggaagtaaaataataagaaataaaaaatgaaataaaaaaacggccgagatgtggtggatctcggccgggagtgtttctgcttgaactaacctcaagcagagggaaatgaaaaaaagattgtttagttgtggtatgggtatatattacagtatttgtgtgatttttgcaatagaaaaatttgttgatattgcttaaaaagataactatgtttttgttaatattttacaattatatacttttatacattgataaaactaaaagtatatgtaattaaaataatttttacacacaaaatacacttatatatttaattttttctatattcataatagttaaacgtctggttttgtgctcttttatagaaagataatctgctccaacgtctgaaagcactccgcatttttcaaatttgctgccggtttggttccaaaacgctacgcaaacgttttcgccgcagaagttttgaaggtattgttttaaaacggttgatgagttgttagaattctgaggaacactaaagattttctcagtgccgctcagcccgtttgttctaataatagcgtcataaaccgtcttttcttcgccctctgcgtccggcggaagtatcaaatcatcatagttgcgcgaatcaatgtttatatttaaagtttccatgttatgtttgtttctgcctgaacggcggttatttataggttgtttcaattaccattcctcctatcttagtaatagtctattcagaaaaaataaaaagtttacaaaaatatgaataacatttatatttttgcaaagaatagatttgcaaaacaaaattttaaaattttataggaggtttgacaatgtcaagcaaaagtaataatcaaaataataaccagaacaacaatcagaacaacaatcagaacaacaatcagaaacagaaccaaaataacaatcagaaccagcagtctagcagacagaacaacaatcagaacaattcaaattctaataactaattgcagaaaagcatatttaggggcaacaggtattgttgccccattttttcatttattacttcttgtatttgtgtcctgttccgagaataataactaagggaattgggttaaagacaaggaggtagataatattgcctttattaagcagaaaaagggttggatttatcatcactgttttttttgtttttttggtatttttcgggatttccgcagaggcggaggaagacggaaatgctgcggcagaaaaatttgttgttccgggcggacaaagcgttggggtttctttggacctcagcggggtctatgtagacgggctgggtgatgttgagaccgagggcggcgccagcgcctctccggcaaagtcggccgggatagtgtcgggggatataatcacagctataaatgacgaccctgtaaaaactgttgacgacttcaggaaaaaactgaacacacttgaagatactgaagaggttaaggtcaccttaaaaacaagccagggaacagaagagactaaaagcgttgttcctgttagagcgtcagaagacggttctatgaaaataggcgtttgggttaaagacgcggcttcaggtgtaggaaccataacctactatgacccgcagacaaaggaatttgccgctgtcggtcatagcattagcaacgttaacgccggtattgcttcaggtgaaataacaggagatatttttaagtccgaaatagtaggcgtgagacggggagaatcaggaaccccgggcgagcttattggagtttattcagaaaataagcttaaaataggagccattagccaaagcaacgaatttggaatcgtgggaaccgtttcaaatcccgaaaatctgaactctatgcgccagcctattccgataggcggcagggactcagtttctttgggtgaagcgattatatgttctaacgttgaaggaacaaaaatccaagaatttactattgaaatagtagagattaatcagaacagcgattgcggcaaagatattgtttttaaagttacagacgaaagcttaattcaaaaaaccggaggtatagttcggggaatgagcggaagcccgataatacaaaacgacaaaataatcggttctgtgacacatgtcttggtcaacgagccgacaatgggctacggaatttttattgaaaatatgcaaaaataatttaaaaagggtgattttttcacccttttttacagaattgccaatttttggcggttattttgtcgaatgggttgacaacaaaagggaaattcactataatttgaatatcgaatgttaccaaattatggcaaaaatgttacaaagaaattacgacagcgtttttcgacacttttgtctatggtaaatatttataaaaatttataaaaatttaatcacatagggagaaaagaaatggaaattaatcaaaaaatcaaagtagcagtagcagatttcgacagggagttcgcagacggattgtgcgagtatatgagacagactacaaaaattgacgtggtgggttgtgcgtatgacgggttggaagttccgggtttggtaaagaataatgacgtagatgttttggtaatggatttggtgctgccgaccatagacggaataggagttcttgagagaatcaacagaatgcagctgaataaacgtcctcatgttctgatagtaagctcagtcttgaacgagactgtaacgtcatattccaattcatacggcgttgaatattgtatgttgaagcctgtcaactatgatgcgctgattgacagaatcacaatgatggcggctccgataaccacaggcgaagatgtaatgcagaactggaaggtgaacacaaaaaagtttgactatgcacaggtagaagcaatggtgacaaacgttatacatgagataggcataccggcgcatataaagggataccaatacataagaagggcaataatgatggcgatatatgatttggatataatgaactctgtaaccaaagaattatatccaaccatagcggagaacttcagcacaacgtcgagcagagttgaaagagcgataagacatgcgatagagctaaaaataaaaccatctgtaatttaggaactaattagaattaattatttaatataaataaaatttgctactgcgcgcctaacgaggcagattacatctgccctgccgttgcttgcagaaaatattttttatacgagtatatatttgtaaaaataaaaccatctgtaatttaggaactaattagaattaactatttatataaataaagtttgtgactgcgcgccttacgcggcagatttcatctgccctgccgttgcttgcataaatcatttattatataatcatttagatacttcaaagaaataatattatatttccttattattaataataattgaatgataaacattttttgatatagatagtaaatatgaatataaaattgtttaaatattataattatcacaaatacttttagcattataagcatttttattattacaagtctttttcgttattgcaatttgtttaattattataagtataatatactctttaaaaatgatatttgcaagcttcggcagggcaaatgtaatctacctcgttaggcgcgcagtcacaaattttatttatattaaataattaattctaattagttcctaaattacagatggttatatttttacaaatatatactcgtataaaaaatattttctacaagcttcggcagggcagatgtaatctgcctcgttaggcgcgcagtcacaaattttatttatattaaataattaattctaattagttcctaaattacaaatggtattatttttacaaatatatactcgtataaaaaatattttctgcaagcttcggcagggcagattacatcgccgcattaggtgcgcagtcacaaattttatttatataaataattaatttaattagagcctaaaatacaagtgattttatttttactaatattataactcttataaaaaatgatatttgcaagcaacggaagggcagatgaaatctgccgcgtaaggtgcgcagtcacaaattttatttatataaataattaattcaattaaagcctaaaatacaagtgattttatttttactaatattatatactcttataaaaaatggtattagcaagcaacggaagggcagatgaaatctgcctcgttaggtgcgcagtcacaaaatttatttattatagaataatttgttcaaattagagcttaaaataaaaaatataataaacaaaaattttaacgattatatttataacagttttataataaaatatttttgattggaaataatataatagttcttgcagatttaaaatttttaacttttgacttattattttaatcgttttagataataatataataatcagttttaaaaaagtgtttgataaacaaagttgttgtaataatgtaactgtttttagaataatataagtttataaggaaataatatcaaaagaatttataattaaataatttatggaggacatagtatggatattattgcattgattttagtcattattggaggattaaactggggacttgtcggtatttttcagtttgatttggtagcgtttttgtttggcggttcggccagcatcatcagcaggataatttatacgcttgtgggtctcggcgcattgtggagtataacatttttcttccgtgatgaaatcttgtcaagattcaaagctaaaaagctggattaatataataagttatatgccgtgtttcttaagaaacacggcatattgtatattacttaatttgtaataatcagtttatacttccggcgctgttagcgtctgaccatttctgttcaagctgcacccagtcgggattccgtcctatatatgtccaggtctcgtaagttgaaccggcagggcgttcgtaatcatgggtattggttgcttcctgaacagcagtgtaataccattcatttttgtctttgttatctgcccatgtcttcatatttttatgaagaccgcttgtgcgtacatgtctgtttaaaacattgttgacaagcgtcatagcttcggctcttgttatgagctggtcaggtttaaatgttccgtcttcatatccttgtatccagccttcctcagccgcgatatttacataattctccgaccagtgtccgccaacgtcgccgaactttccggttccgctgtagactacatcgctaaatcttgcagcaattgttgcgaattcagctctggttatataagctgtaggcttaaaatacgctgtgccgtcaccaccgagaattccggcttttgtaagagtggaaatagcgttgttcgaccataagtcagccgggacatctacataatagttaacttgtgaccaatactgagatctggatttatcagtaagcagtctaaagaaaatagttgccacttcatctctggtgatattactttcaggtcttatatatccgtcaggatatccgactatatatgcaaagtggtcgtaagtattaaggttaggtttcggcgtggctgtaggtgttgttcctgtggagtgacctgagttgcctccgcccataaccgaagttttatagaactgatgtgagatagtcatggattttccgtcttcgcttatattaactatatctgctggcttgttatttatatatgctgtcattgcgccttcatctttagagaaagtgtatccatcgttagcgtggagggtcacagcggcagtataaacggtgccatagttaaaattgcttcccggatatactgttgggtcccattccgcttggtctgatgtgtaataggaatttcccggaatcttgacatcaaagcttactctttgatttgaagcaggagcttttatctcagctgacgcatagcgcataacaaatgtcagttcttgttttgccagcctgtttccgtatatgatatttataaacctgtctccggaatatacgtcaatatcaggtatttccgtgtctaatcccggtttgaatgtgaaactgtcttttgttgtttcgtcatatacaacgtttgaacttgttccgtctgtatttattatattgagaactaatccggttgggtcaaatttttctccgttgatatattccgtttttgtcggaggagttgatatttctatatggtctattgtgcttgcgtcttgtgtgacaaccgttccggatatgtcatatccgttcacgttcaggcttatgtcactgtttttcaaatcaggctcttttccttcaattgctatagctgaaatatcataagctccatttggtacagaagcagtaaataatactttatctgctgtatctgtggctctaaccatttctgtttcggaagctgtctctttatttataagtttaacatttgtgatgttttcatcagcatttatagaaacaagataaagaggttccggtgtttgggttggtatgtttgcggttgcttcaggagttggaatcggacttatggaagcttcagggtcaaaacttggtgttgcagtagggtctgaacccggttctgttgaaggtgaatttgtcgcttcagggtcagaacttgcagctgctgttggctcagcggaaggaacaaaagttggctctgctgtcggttcaatcgtcggttctgctgtcggggttgttgttggatcgggcgttggctccatggttggttcggctgctggatccaaagttgaagcagcagttggttccgacgtaggtggtgctgtggtcgtttctgcaggaggcagggtgggaataattgtaggctgtaatcccggtgtttccacagctgatggagatgcggaggccggctcaggcaaaatattaaatgtcactgccggcatattagaagtttggtttactgcgccgttattttttacaaaatattgtctcggattattagaagaagccattatccctgtcttattgtttttcaggtttgcgatattaattttatacccggaaaatatttcgtggttttcatttgttgttccatcatcttttagtattataaaatctgacccggtatcactggtattatatttgaaatcaaaaatggcgttaacatatttataacgggtgtttccaagccgtataggatttgctgaatttttaaagttgtttttgactatggatataaccgcgttatctgaaactgagtatatgcttatagcgttgttagctatatttccgaaattgttttcagaaaacacactgccgttttgaacttcatatatcccattatatccggtttctatacaattgaaataagcattgtcggcagctttggaaaaatcatttcctgaaactgtcagttttcctttaaccgacaaagatacaggcgttctgacgccgttgtttatgtatgaattttgggctgtaaatttacagttttttaatgaaaagtcatagtttccggcggcgcttataaatccgccgtcaccaaatgtaaagccattaatggtaaccgaggattttaattcggctttttcgcctgaggttataataacccgttcattggccggctcaattacatcgccatttttagcagattcaacggctgtttttagagaagtataatatgtatttccaattttggcggtgtaattattagttggttcaccggcgtatgccgtgaagaaggagaacatagatataaacacagttattgtcagcatcagaggcagaaaacgcagtttttttatgaaagtttttttcattttttaatccctctttctaaaataaattttttattatatatataataaatctataaccataatgaagttcttaaaaataaatttataagctttcgtataaaatcatcccaatttgtcgaaatgcactaaatatatttttaaaacaacacttagttagtatatatgacttctgttattcgaaaaaagttcccaaaatttaaaattttttctaattcataaaaatataaataataattcaacagaaaaatcggccgtatccgcaaaagcgaatcggccggtttttaaattttaatattcaaagtttactgcaattttattagtttccgcatctgcatccacagccacagccgcggtcattcttaccgcaattagaagatgtgaaatcatttgtctttgtcggcgggaagaattcgtctatcgggaatctaacgttatcaaaaagatcacatggatcctgaggtgtagctccgacgcaggtcttttccggaatacagaaatcaactgcatctatcaaaagctgaacttttctttctattctaacgatagtgaaaagacctagactgacaagaactttcttgatgttgttagctataacaagatcttcgccataacatgaacaaatgtttgtaggaatagaaacatttgtgtcacagcagcagcatgaatcgtcaacaaggcgtgcgctgagagctattgggttaactacctcaacagttattttaggcatgttgttgcttttccagatatgttccatgcagtctccggggtcgattgtagattcaaaactctttgtttgaccttcgcttccatataacataacgcgtttgtcataggttacaagtccgtgaacttctgtaggagcacaaacatccgagaatgcttcaatagtaacgtcaataaagtattttatgtctactgaataatagcctgagctatataatacaggttctgtgtctgtgtacacccagataatttccgcctttttaagtttaacatttattgcgctttctattatttcctgaccgcactctgtgaagtaaacgcgctcgtcaacaacgcaggttctctctctgcatgcgtcataaactttgtcaacgctcacacaaaccggctcagaaaattcttcactgcgtcttcttttgcattcgctgttctcgctttcagtatcctgaacagttccgggaacacttacaggctctgcagctgtttcagcattattacagccgcagctggctgcgcgctgtcttgtaaattcatttttgcagctcataatcaaaaatcctcctaaaatatttaatggtatgcggctttgccgtaacctcaatatattatattgcagcttccgacattatgttacacaaaaatttaattatgtttaggcacagctttttatataagtagatttagtctgtatttatgcggaaatatttgagtatgttgaaatatatataataaaaattttttatgtcatgatgtttattataattttcaatatattttgattcttaaaaattacagttttattgttattatatataagtttttaatatttttttaagtttttagcttgaagtattgtataaaatgctatataatgaaaaatatgaaagtaaaaatattttagagggggtatttttgtgcatttaaaaaaactattagcttttgtattaacatgggttttaggtattgcagggtcttctgctggtatggtaacagtttttgcggctaacccgtgggacggtatggtagaaaccagcgtactggaaaaagtaacggataccactaacagagtggggacagacggaacatttgacgggtatattcaaaccgttcagggtgcggatttgctaaacagcagttatataaaagttacatatactgtaacgggtactgtgaccgatgatacggaaattttcacagttcaaccgtttgacaccgcctggggcggatggaatgataacaagataaagataggcgattctattttatcggacggtgtttacacggcatatttgtcggttgctgatgtaaaagcttcgctcacctcaggaactttgaaaggaatcaatatctcgtttttagaaaactcaggatatgacgcaactttaaccgggtattattatttggctcctgagacagaagacccgggcgtgatgactgataaaaaaagacttaaattaagtcttgattactgtgccgggatggatgagtcaaaatatcagcctgattcctggtcaactttccaaaaagcggtaactacagcccagtcagtttataacagttctgttgccgatacaaaatatgccagtgctagagcagatttagaaaaagctaaatctaaacttttgtttgttgacagcacggaatcttcaaatccaatggattttagaataataagcggtgataacactatatacgaaatgggtgttggctggaatcttggcaatactatggacggtcatacaggttttcatccggcagaaacagcatggcagagtgttgtaacaactcaggaaataatcaaggctgttcatgacgctgggttcaatacggttcgtgttcctgttacatggggggatatgattgacgatgaaaatggttatgcaatcaatgacgcgtggataaaccgtgttcaggatatagttgattattgtacctcgcttgatatgtatactataattaatatccatcatgacggagcggagcaggacggctggctgagagttgccgctgacgatatagataaggtatatgaaaagtttgaatgtgtatggagacatatagctgagcattttaaggattatgacgagcatcttatatttgaatcggcaaacgaactaacttgtatggaaggcagcgacaagaattcgtctgctgctattactaaagatacgcctgttatagtgaatttaaatcagatattcgtcaatgtagtgcgttctacaggctcaaataatactaaacgctggctgtcagcagtatctcactatgcaaatggtggaacgcaaagcggattcgcattgccgactgattactataattccagcaaccgtcttatgttctcagctcatatatataagtcaagcactaaaactagctggacatattcagaggtatatgaggttgtatcggctttgacaaagatggtaaagaaacataaagttccaattatattgggagagtacggaaacagaaataagatgaacagtgctaatccgagcggatataatgacatagacagggcatggtttgatgaaatagttactcgtgcttgccaggttggaaaggttgttccgtgtgtttgggatcagggatggtttgatttgacccagaagccggattcaacattctcagtttggaaccgtgagggaaacgctccgatatttaagaccatcaccgacgctatgatgagaggcgtctatctaactccgtcaagcaaaaataagagttatgatatgactgatatagctatcaatcctgctataaccaatataaccgatatatctttatcagacgccaatattgatattgagtatggtgacagcgtcacagtaagcgcagaggttcagccgttgggaacaaatgacgttctgctgtggaaatccagcgacgactcggttgctactgtttcaagaggaatgataagaggaagaaagataggatacgcgactataacagcattttcgcagagcggctctaaagaggcggaaatgactgtcagggttcttcctaaaaattcagataagcaaataacctcaatattaactgacagtgaaagctatcaggtgatgaaagataaatatgttaatatgagtgttttggctgagcctgccgataatactgattcattgatttattcatcatcaaatccgaaggttgcaactgtcaatccactcggcaaaattgttggtgtttcagctgggcagacatatataactgttatgtcttcaagcggaattacaaaaacggtgccggttacggttacagagtccgcttctgatgaatctatagaactggcggcaaatgtatattataacgatacgctttatgctgcaaatgagataggaacgccgataaaggtaaatggagacggacaatatactgtttcgtttgatactgcagtcgatttgtctgataaagctaagactgccggtataaaatatcttaaaaacttgacctcagtttatataaaggataatgcagtagcaacaggtcaggctgtaaaatcaccgcttgacagctgtgatataagatatgattcaattaagcttgacggggttccgcttacaataaccaagacggactttaagtcagctttaaaagacaacagcgtatttgatacaaacgaccctataaacggttgggatggttccgcggttaaagaggtatcgtcaagtaaccataccgttaactttacttcatcggatacaccgtcaaagattgagataacatttacacttcaaaacctaaaattcacgccaaacagttctgacgacagcaagccggctgagaagcatgaagctgtgtctgataaaaggatagttttaaatgccggtgatagttttgaaataaagacaaaaatttctccgtctgacagtacgtcattggtgacgtttgtgtcttctgatgagagtgttgcaatggttaaagacaatgctgtttcagctgataataacggtgtttgcacagccaaacttacagcgctcagagaaggttccgcaaagataaccgctgttactgataacggacttacagttgaatttgacgtgacggttggaagtatggcgtttagcaatgctaaagccgttatagacggaggaaaagtcacatctgttactgccgatatgaattatgctcctgaaagtgatatattagcagtagtttgcgtttatgacgctgacggcagaatgagcgtctgcgattcaaaacctgtcggtttagataatatgtctaacggaaaacttactgtttcaggttttgatattccggtatctgacggacagacagcaaaagcgtttatttggaattcgtttgaacaaatgataccgcttagtgattaaactgacttctttattatgatcaattaaatataactccctgggagatacggaaagtgcagctctgttttcatagacagaactgcatcttcgatattttcccggggagttatttatgcaaaatttacgccttacgcaatatactttgtcaagattttgtcaaatgccccaaactgttttcagaaattaaaaaaattaaattatcctgttgcataattataattttatgatataattatcacagtaagcggtttcaatcgaattttggcggttttgcagccgaaagggtgcatttgtatttattttttttgcctaaatcggtgttccgcaaaatgaaaggagcaaacatatgaagtattcaagtgaagtagaagcgatgtgccccttggcgaagggtgcgtatcacggtcctgcgcctattcctcaggagggaaaatggacgcaggctaaagaagttacagacatttcaggcttgacccacggaattggctggtgtgcacctcagcagggcacatgtaagcttactcttaatgttaaggaaggggttatccaggaggcgctgattgagacagtaggctgcagcggtatgacgcattcagcagctatggcgtctgaaattcttgtcggtaagacaattttagaggccctcaatacagatttggtctgtgacgctattaacacagcaatgagagaactgttcctacagattgcctatggacgtactcagacagcattttcagaagatggactgcctataggagccggtcttgaagatttaggtaaaggtcttagaagccaggttggtactacatatgctacacttgctaaaggtcctagatatcttgaacttgcagaaggatatattactaaatgtgctgtggatgaaaacgacactattataggatataagtttgttcatctcggaaaaatgatggaaatgattacaaatggtatggacgcaaacgaagctttggaaaaggcgagcggtcagtacggacgggttgacgatgcagttaaactgattgacccgcgtcacgaataagaataggaggaatttaaatatggctttatttgagagttatgaaagaagaattgagcaaatcaatgcagagctagaaaagcatggaatttcttctattgaagaagcaaagcagatttgtgacgataagggtgttgacgcttatcagatagtaaaagatattcagccgatatgttttgaaaatgcctgctgggcgtatacggtcggcgctgccattgctattaaagacggatgtaccaatgctgctgatgcagccgagaaaataggtcttggtctccagtctttctgtatccctggcagtgttgcagatgacagaaaggttggaataggtcacggaaatttgggcgccagactattgagagaagagacaaaatgctttgcctttttggcaggtcatgaatcttttgcggcagctgaaggagctataggtcttgcaaagagcgctaacaaagctagaaaggaagacttgagagttatcctgaacggtcttggtaaagacgcggctcaaattatttcaagaataaatgggtttacatatgttcaaactcagtttgactattacaccggtgaagttaaggttgttaaggagataaaatattcagacggcgagcgttcaaaggttcgctgctacggtgcagacgacgtgcgcgagggtgttgctatcatgcatcttgagggcgttgatgtatctataacaggtaactcaaccaatccgacaagattccagcatcctgtagcaggaacatataagaaagaatgtatcgagcagggcaagaagtatttctcagttgccagcggcggcggtacaggaagaactcttcacccggataatatggcagccggtccggcttcatatggtatgacagacacaatgggaagaatgcacagtgacgcacagtttgccggctcttcatccgttcctgcccacgtagagatgatgggacttataggaatgggcaataacccaatggtaggcgctactgttgcagtagccgttgctgttgaagaagctatgaaataaatataactgcgttgattcagcttgctttatatgggttgaattgaagcggctgaagtgttatatataataaaaataacagaactgcccgcgttttgcgcaccaaactttactggtgagcaaacgcgggcagtttctatatttgcagatatttaatggaagtgtataaaaatattatttttaagcagatgcttatatatgttttatgcaatatattgtaaaggctgcaataatatgaagagaaataaaaaggctgagtaatataaataattatataaaaatgtggctagcaagcgtctgaggagtaacttttaccgtatctgaaagatgtgtacagtcgcaatgacactttgacttagaacctacaatgtcaataatatgaataggcaaattatgactgcgactgtaagatatatgtagcccaaataacactttatataaaattggttaggctacaataaattggacacaaatgttaaggtcatatatcataaaaataatattaatattatataaaaatgtgctcttgcaaacatcggaatgcagatgaaatctgccgcgtaaggtgcgcagttgcggaaaaatttattagtaaaaaggattatggcaaactgtttaaagtttatactaggtgtgatatggcagcttatctaatgagatgtgcagcaacataagattgacaaaccctagttggatagtggataataagagtaataaaattgtggaggaatgggatatatggatagaaaagagcttgttaatcaaagtattgactatataatgcagcatttagataaagatttatcacttgatattttggcttctgaattttatatatcaaaattccatttcagccgaattttcaaagaagaaaccggtgaaagcgtttatgcatttattaaacggtgtaaggttgaccagagcgctgtagatataaaactgaacccagctaaaacaattacagatattggattggattacggatacagttcttccaattatagctcggtgtttaaaaaacatcgtaatatttctcccactatgtttaaacagtcaattccggctaatagtatgacagttccgtttacaccggagagagttgttaattttaaaactgcagatgagtattccgcacgaattgacattcaagaacttaataacttttttgtgatttatgagcggtttattggaagttacgaagatattgaagagaactggtatcagtttttagatagatataatatttatttaaatgaaaatacagttctggtggagcgattttataatgaccctgctataacaaatctgtcgcagcgtatttgtgacatttgcatgacggcagaccgaaactgtaatttgaataatgttacggagattaaaggcggcaaatgtattgtgtatcattatgatggaaaaatcgaagatatttatgagatattacaagggattttcagtgtttggatgcctcaaagcggttataaaatgactcagaggtatggattgaatatttatcacggcattgacagaaagagtcatagagttgttatggatttatgtattccaatttaattagagcaagaattcagaagtcagaagatatatttatttatataattaatggtgttcagtaatacttcaccggagtggatttggagctcatataccaaataagttaataaagaaacattgtatagaaaataaaatacaaattactgttcctaaaatattattagtgtttagaagtacagtaatatgtgttttgttagaaattctattaatcaataaatatttaatatatggaggaaactatgttcgatattagaaaaattcaagagaatataatttatgaagctgtaagggctgaaagcaatgaggatatagcgaatgaagtggtgtatggtaaagacaatatgtcaaaagcagaaaataattctgattgggtaaagtcatcaatgattcgcttagaaaacaattttgaaaccgaaacaataaagaaaataagaatgaactgtcaatgtggttacgaaatggacgaaaaaattgcacttgtaatggaactgaagtcagattcatcaaatatagaagaatttgcaaatgcagagaaagcaaaagaagccgggcttttttgtaaagacggagaactttttctgcaatttgatttttgcccttgtccaatgcttgccgaagtggataaattagagacaaatacatggtgtcagtgcactacaggttacagcaaggttctttttgaaaaggcatttgattgtgatattgatgtagaattgctcaaaagtataaaaatgggcgacgatatttgtcttatgaaaattattttacataacccggtctggcaatgatatatagcaagcaattatcagattttattttaagagaagaaaatgaataataaatatgtttaatttcaaaattgaaattaagtaaaaaaacaaaaaacggatagcaatttaaatgataggctgtcttttttgtttgccgtataaaatagttgaagttagcggagagaaaacaaatttgagtataaatgatatatgtaaattttattaactattttcatattattagcttttgatacgaatgtttatcataccataaagcaaacaatggcaatagtatttttataatcttatatcgtggtgttttaaaatagaacatccattcaaaacagattctaaatatatgttttgaatccacgcacccataaagggtgcgacaattttgcaccgggattatcattcccatatccctcgtttcaatccaacatcttccgttttgtttgatgttcttactatcataataaagtaaatgtttatatatttctatttgcatattgttgcggaaaatgacactgattttatcagcatataagtttatttttaatcgacgtttttactcaggggcgataattcgttgtgtctgcgcattttgtatcaaatattctatctgtactgtacagaacatatatgcaattgaacacacaaacttagtgtatatatctgtatattgtataataagtgttttattaaaattattcataaatgaataacaattttacagacatatagatttttttgaaaagcttattttaatcaagagtgagtataaggtatgataataaataagatttaattttgaattggaaatgtaatttcagtctatttctatataagaagcaacggaaattgccatttgtatagtggagcaaacatggttgaattaacattcttctcatgagatgttgcatatcttaaaatattggttaaaaagtagataaataatatatacgtatttatattggagacttttatgattattttgcatgtaatagattatagttttatacatacccagtatggcagaatttttcacatttataataaactgttttactattttgttccaaaacatatatgatatagattaaaatatatgtaaatttacttaatgtcaacgtaagtttctgccaatagcagaggggaagccacaaaatttgtataggcgattttgacctatgagtttttaataattttatttatctttaaatataagttgagactataaagttaatcattatttgtacaaagatagaaatatcaatccacaaactcgcataggacgacgatacagagatttaccaaagtatatacgtcgcatctacgcactcgtatagagtgcgacacgattgtccgaaacacactattgataagtattaactaatttaaatccacgcactcatatagagtgcgaccggaatacaggtgtaggaaaattgacttgacacagagatttcaatccacgcactcgtgtagagtgcgacatacttttttgtgcaaacatcttaacatatgggtatttcaatccacgcactcgtgtagagtgcgacagcaaaaatatataaaaataaatttgttaaggtatcatatttatgtatttttatattaaataagaataatatatattaaatgtattctataccttagtcatatttaaaaaatacttatatatttctgtttaaaagtggtgcgaatctccctgacattttatgggagcttcaggttcgcactattattttagatatttttaatactgctttatgtttctatttttttgttttttacttggttttaaataattcgataaaatagtttttacataatattttcaattctcaaataatattgttttataatttataaaatattgaacattataaatcttttcttctattatacaactcttttcaatataagtaaatatatttttacttttttatcctattaaataaaaatcttataactcatatttataaataattattattaaaattaaatttatcaataaaacaagctgtttgtatattaaataatttatttttataatttataaacatatattttttaaaaagtacttgattttcatgaatatatagtatataatattatcgacatatgtcggtaatggaggtgagttatgtcaagaccttttaaatgcagaagaatatgtgaagaacctaagtataacagctttgcaccgcttggcgttgaaaatcctgagaaatgtatgatttctgttgatgagtatgaggcggtaagattaattgaccttgaaaaaaagacccatcagcagtgtgctgaacttatgggagtttcaagagttacggttacagatatgtatgaaaaggcacgttttaaaattgctgacagtattgctaatggaaaaatattatgtatcacaggaggaaactatcggatttgcgaaggttcggtaaacaaatgctgtggaaaaaggtgtaaaaaattaaaatcaataaaaaatttagttgtaaagaaaaaaggagaaggtaaaatgaaggttgcagtaacttatgataatggtgaagtgttccagcattttggacatactgaaaattttaagatttataatattgaagacaaaacgataattgacgccaatgttgttaataccatgggcagcggtcacggggctcttgcaggctttttagttgaaaatgaagttgatactttgatttgcggcggtataggaggaggcgcccggaatgctttatctgaggcaggtatcaccctttatggcggtgtttcaggaaatgctgacgacgctgtgaaagcattgatagatggaaacttgggttataatcctaatgttaaatgcagtcatcatgaacattcatgcggcgaacataagtgcggagaggaaaagcacggctgcgaaggcaaataagataatgattaatgaaataagtataggaattttataataaattctgtgatttttataaatttgcaacatatgttttaacatgctatataattaatttgtatttaatgggctgctgtacgaattcagcagtctttttttattatcacttatcttaaaaccaatttgtaaaatatcatattactattggtgaacggaatatgtttttgaagtttttataataatcaaagttattatattaataaattattgtaaattatttgcaaggttaacagaaaactagacagaaaaattaagagtgttttttgtaaacaacggtatataggataatattttaaataaaaagttatataaaaatgaggtatagtatgaattgtatggctttgactgaacctgaaagacgggtgtgattcaaagtgacttgttttgattaatttacaatgtcaataatcagacttagttgtgaaggcggatgaaatctgctgcgtaaggtgcacggttgctgaaaatttattataataaggtttataatgaacttttctaagtatgtttgcgcttagcgtgatatgacggctcacctgtcgaagcgtgcaagcatgcactgccgttgtttgcataaaacacatttaattatcttccaattattgcagcctttccaattatcgggcgtcttacattaacagctgactgtattaaaataaaaaataattaatgaacaatttgaatatatttgacaaaaaaatccctctgtgaattttcacagagggagagaactttttatttaaataatcagtattattaagtgagattatttaaattgtttatatgattaatatattcgtcttttgtatagaagtttaagacgtcgatatctgtttgcagttttttgagaatttcggcggtcgagtcagaagaaccataatcgacaaccgaaagtccgctgactgttatgtttgcgtttccggaagtcaattttccggataattgtctcaagagcccctccacatcgttttcctgattcttgacaaatacgacaagctcagacggaacttcagtttttttctcatgactgagcccttcaacgataccataaaggaatgtaataagaccaattatcgcaaatataccaacaaacaccaacaagatttgatttatcatactgccatcaactccttgatagtagtataatatgctaaaaacctctatttgtgatgatatttatattaatacattccgccgcctgcgcccatagcagcagctgcagcagcgtctgctgccggatccggcttatcagctacaacgctttctgtagtaagaatcatagacgcaatgcttgaagcgttctggattgcgcttcttgtaacctttgtcgggtctactataccaaatttgagcatatcaacatattcacctgtaagagcgttgtatccaacaccaacttcgctgtcttttatcttattaacgataacgcttccctcaacaccggcattgtatgcgatttgtctaacaggctcttcaagagcgttcagcacgatttgggcacctgttttttcgtctccttcgagtgagttcataagttcttcaatagccgggagagcgttgatatacgcggtgccgccgcctgctacgataccttcttcaacagctgcacgtgtagctgcgagggcgtcctcgattctgagcttcttttctttcatctcaacttctgtagccgcgcctacttttataacggcaactccgcctgaaagcttagctaagcgttcttgaagcttctctttgtcaaactctgatgttgtttcttcgatttgagccaatatctgatgaactcttgcattaatgtcatctttgtcgcccattccgtcaacgataatagtattttcttttgtaactttaacctgacgcgcacggccgagctggtttgtctgagtttcttttaagtcgaggccaagctcatctgaaatcacctgtccgccggtcagaatagcgatatcctgaagcatttcttttcttctgtcgccgaatcccggagcttttacagctacgcatgtaaatgttccgcggagtttgttaacgataagagtagaaagagcttctccttcgatatcctcagcaatgataacaagctttttgccttcctgaacgattttctcaagcagaggaagaagttcctgaatgtttgagatttttttgtctgtgataaggatgtaagcgtcgtcgattacagcttccatcttttcggtgtctgttaccatgtaaggagttatataacctctgtcgaactgcataccttcaactatttcagaatatgtctcagcagtctttgattcttcaacagtaataacgccgttgtttgtaactttctccatagcttcggcaataagtgtgcctactgtttcgtctgcggcagagatagaagctacgcgggctatatcgttctttccgtcgatagccttgctgttttcaacaattttgtcaacagctacgtcaacagctttcttgataccctttttaactatcataggattagcaccggctgtaacgtttttcagtccttctctgactagcgcctgagctaaaagagtagcggtagtagtaccgtctccggctacgtcgtttgtttttgtagcaacttctttaacaagctgtgctcccatattttcaaaagcgtcttcgagttcaatatctttagctattgtaacgccgtcatttgtgatgagcggagcgccgtatttcttgtcaagaacaacgtttcttccctttgggccaagtgttactttaactgtgtttgcaagctgatcaacaccgctctgcagtgcctttcttgcgtcttcaccgaactttatttcttttgccataatgcattacctcctaaaataatgtataagtctggattaatcaacaatagccaaaacatctttttggctgatgataacatactcttcgccgtcaagtttaacttctgttcctgcatatttgctcataataaccttgtcgccggcttttaattccattttaacttccttgccgtcaaccactccgcctggacctactgcaatgacctcggcgaactgaggtttttctttagccgaacctgctaaaataataccgctttgtgttgtctcctcggcttccgccatttttgtgactactctgtctcctaatggtttaatgttcattttatatgcctccttaaatttaattatctaatctgttagcactcgtcttgtttgagtgctaacgctattctactcgttttcagtctataaatcaaacttaattatctggaattatatgctattattgtcagttatattcaattataatacaataatcattgatttctaattttttctatacaattacaattaaaaaagctagtctcttcggtataaaagaggagggtgccgttcgattttcataagaataaaattaactgctgaaatgttggatggtatttttatttagcagtatcagattattcttattgtgccttttttatactgcataccgcctgagcggaaattccctcgcagcggccctcaaaaccaagtctttccgttgtggtggcttttacgctgacgcggtctgtatctatattgagagcagaggaaatattgctgcgcataagctcaataaacggtgcaagtttaggttcctgtgctgctatcacggaatctatgttgattacagcataaccatggtttttcagcagctcgcctacatgtttaagcaggtcaatgctgtccgcgcctttatattctttgtcggtatccggaaaatgttttcctatatcgcctagcgctgcagcaccgagaagagcgtccattaaagcgtgtattaaaacatcagcgtcactgtgcccgtcaagacctttttcgtatttaatttcaactccgcctagtatcagctttctgttttcggtcaacttatgcacatcatatcctatgccgactctaatatcattattattatttgtcaatataaattcactctccttgcggtaatattatttgtacagtcaaatgtgtaaaagcggagacggtaatgtctgtttttataatttagaaagtcatgggtttaatattttgttattgtttaaactgccagtctgccaagatattctccgagaataatgcccgaaagacataggatgacactgagtattgcgtaaattgttcccaaaaaaggttcgccgcgctgaaacagttgtacggcttcaagtgaaaatgttgaaaacgtggtaaaaccgccgcatacaccggttttaagaaataacaaaaacttttttgatataaatagattatccgaaagtccgacaataaatcctattaacagcgcacccagcaagttggttatcagtgttaaaaacggaaaggtgttgttaacaggtattaaacttattaaatagcgcagcatggatcccagtgctccgccgagccctaccataataaattgaatcagcatattggtctccggtggatatatatcacatccactttttctttttaaatattaatatcagaaacaaaactatcgcggcgcttactgcaattactgccgggtatccgtaaacggatttaaattcaggcatatcaaaattcattccataccagcctgccagcagtgtaagaggaagaaagatagctgtgacaacagtgaatactttcatcagattgttctgacggtaatcaagctgtgactgataagagtcgagaaccattgctatgtagtccctcagattgaccgcgtcgtttaagagatggtctatgcgccgctgtattattccgcagtaccgcacgccgctgtctgagagcaaatcattctcatttgccaggagctcgtcaaatattagttcgagctgttggtagtaacgtttaaaattcagcaggtcttttctaagagaaataatcttccttgtaaaatctttttcttctcctgaaataaattcatcttcattatcagtgatacggagttcgtattcatcaagccatgccatatcgtttttcagcagcctggcaaaaaaatgatacaggagctgttcgttgttcagcgaaccgtccgaggcggcagttccggcaagttcttcagcgaccctaagcataggctcttcatgacatataaaaaatatattttctttgtcgagataaattgtgattttagaatcttgtttatcttttatttcatggtagttgaaagataataaatcgaaatcttcaaagctgcaaaaaaattctatctgatgtctgtcacctgataggagcttttgaactttgtcgccgataattccgctgatttcagatatattgctgagcgtaagtattttttgcatggtatgacaaccccagtattatgtattgttttgaattttagcgatgatagcttccccaaggattatatcttcgggagtggtgatttttatgttattataatctccggttatgactttcaccggttcacttgttaaagcttcaataactgcacagtcgtcagttacggagaggttcaattctttggcttttttatgagcttccataataatgccatatctgaatccctgaggtgtttgtattgacacaagtttgctcctgtcaggagtgttttcaatatatccgcgttcgtttgtttgcttgattgtatcttttacgggtacgccaatagcagcggcctttgacgagccgctgcggagttccgatataatttcttttatataatccgctgatacaaaaggtctcgcgccgtcgtgtatcagaacaatatcatcattgccggaatttaaatgagacaaaccaagaaaaacagattcctgtcttgtgcttccgccttcgattactgcgctgactttttttatattgtgctcagataccagttttttgattatttcaatatcacattttctggtaacaattaatacagaatcaatttcagacagaaactcaaaaacatttatggttctgattataacaggaatgccgtcaagctcaataagctgtttgcttatattagttttcatacggctgctgctgccggcggctacgattattgctgtagtcatatattaaatcctttcgcgctaggaaattttgctcataagcatatcttcaatgtcagaatacgacgagtttttggacaaaacgagctcagaaatcaatatggttttagcgttgctgagcatttttctctcagcgtttgaaagactcttctttctgtctctcattatcaaagtttttgttactcttgcgatttcaaacaagtctccgtcttttaatttttcaagattatcccggtatctcttattccagttatcatcttcgtcgcagctgcatttttcgaagtcattgatgacagcgtctgcctcgttctcagatactatatatcttatcccaactttttctatccttgcgacgggaatttttatctctagttcaccaacgcagggctctaaaacaaaatactggtgttcctcaccgagtattttctcttcctcaacacattttataatacctgctccgtgcataggataagagactttgtcaccaatttgaaacataaaataacatcacctttctaaattttgcataaaatagatttcaatactcaaacattgtgagtacgtagtctgtttacatccgtttaaaatatatctttcattacctgtgttatattcgagtattgacagatttctatatttttaaactttttccggtcttttgctcccatataaggaacaataatttttttgaatcccattttttcagcttcaattattctgctctcaagaaaactgcaggaacggatttcacctgttaaaccaacttcgccaacagcggctatctcttccggaaccggcttgtttttgaagccggaagccagcgctatgattattcctaggtcggctgcgggctcaaccattctgagaccgcccacaacattgatatatgtgtcataagatgacagatgaagcccggcgcgcttttctaaaatagccagcagcatcatagctctgttgaagtcaacaccggtggtcattctgcgcgggttaccaaaagcggttggagtagctaaagcctgaatttcagcaagcacaggccttgttccctccatagtgcatacgatacagcttccgggaacaccctggggtctgcctgataacatagctgacgatggattttttatctcagacagacctgatgaattcatttcaaaaacgcctatctcatttgttgaaccaaacctgttttttattgccctgattattctgtatgaacggttttggtcgccttcaaagtataaaacgcagtcaacaatatgttccaaaaccttcggtccggctatagagccttccttggttacatgccctaccaaaaaagttgcgatagaataggtctttgctattctcataagcatggaagctacgtcacgtatctgtgaaacgctgcccggggcggaattcacgttggggttaaacatggtctgaaccgaatccacaatgagaatatcaggcttttccctggatatacattcaagtatgttttcagtattggtttcagagaaaatctttatattgtcactgtccacacccagtctgtcagcccttaattttatctgtctgagagattcctcgccggaaacatataatattttctgcgtttttccaatgtgctgacaaatttgaagcagaatagtggattttcctatacccgggtctccgcctaaaagaaccagcgaccctgcgacaagacctccgcctaaaactcggtcaaattcagacagtcctgtgcctgttctgatttcgtcagttgttgatatgtttttcagacgctcgggaaccgctgagtctcctgcgttttcaagagccgaaatagcgtctgatttcatgcctgagcgtgaagatttacccggctgttttgtaattactgtctcttcaaccaatgtgttccaggagttgcaggctgtgcattttcccatccactttggaaattcgtttccgcattctgtgcagacaaaaactgttttggttttcattaatcctccagactcagaatattttaaacacttcatattaaaaaatcatgagttcttacttatatttatactcatttattataacacataaatttacttttgtctaatataaaaaatcacaattttttgtgccggttgtttattgttttatcttaattttgccatttttttggcaaatatggcatatatgatgtgtgaattgtatatattagtatgtgcaattgttagaaaaatgtaataatttcacacttgatatttgcggtctaatattatataatctctctatattgtaaggggtgaggcttgtgcatacgtacgtattggaaatcattgtcgatttcttagagcttttcctcttttttattggtacgtattatgtcgtctgcggcgtattctcttttgttaaaaggaatgacgtcttaagacaagattttcggacaaacagattcgcggttataatacctgctcataatgaaggcgctgttttgggccagcttttaagcagtatttcggcttcaaggtatccaaagaataagtatgatgtgtttgttgttgccgacgattgttctgataatacggctgctgttgcggggagttatggagcgagagttcttgttaaacgtaccggtaataacaataaatcgtccgcggtttcatacgctgtggagcatataaagagtttgagagaagaatatgactgtattgccgtatttgacgcggataataccgtgcatatggattgtataatgagaatgaatgagatgcttaactgcggatattctgctgttcaaggatatgttgacagcaaaaatccgaacgaaaactggctgacagcggcctattcggtttggcatactcttgaaagcaggcttgctaaaatgtcgtgccataacctgggaatagggtgtaaaatatccggaaccgggtatgctgtgaggtttgatgttgtgaagcgctgtatgccttctgacgactgccttgccgaggaccttgaatatactgtcagacttagactgatgggaattaaagttgcctttgctaaaaaggcggtggtatatgatgagaagcctgctgagttcggtaagtcggttaagcagagaatcaggtgggctcagggcgttgttgacgtccagggcagatacggtggtcttttgctcaaaaaaggaaaaataatagactggctgagcctttatggagattttttgggtcagttctgttatggagtttttttggtcataagtattttctccacaatttctattttgtttggatatcagtttgctttatgcagtttgtgggttcgtcccgtctgctatgtggctcttaatttatatttgggtatcggtgctcttagtgcctttgccgggcttatattggaaaacaaacttagccggaaaacaattttcaatttatttggttttctgctctatatagtaagctggataccgattggaatagtcgggatctttaagcataacaagaaagagtggtatcatacggaacataccggttctgttcaatagcacagtgtgtgcagaagctattttgataaaaattatattattttgtgatagatttgtatgatggcaatagctgtcaatattttttggaggttaattttatgtgcggaatagttggatacgttggaacaaagcaggcggcgccgattttgcttgacgggctgtcgaagcttgaatatagaggatatgattctgccggcgttgctataatgactgatgaaggaatagtggttaagaaaaagaaaggccgtttggaaaaactcagcaatatgatagacggtggagacgcaataaaaggcactatgggaattggtcatacaaggtgggcaactcatggagagccgtcggatatgaactcgcatccgcatctcagccagtcgggtagatttgcggtcgtacataacggaattattgagaactatctgaagcttcgcgagtatcttacaaaaaagggttttgactttatttcggaaaccgataccgaggttatagcgcatctgtttgagtattactataacggcgatataatcgacactatgattaaggttataggcaaggttgacggttcttatgcactgggagtgctttgcgccgacgacccggattcttttatagctgtcagaaaagaaagtccgcttatagttggtctcggcgagggcgaaaactttatagcgtctgatataccggctattctgaagcatacgaagaacgtttattttcttgaaaacaacgagattgttgtcttaacaaaagacgatgtaaaaatttataacaccgaccgcgaagaaatttctaaggaaacttttgttgtcgactgggatatttccgccgctgaaaaaggcggttatgagcactttatgtttaaagagataatggaacagcctcgtgccatagctgatactgtaaacccaagaataaaagacggcagaattgttttggatgatatatctttaacagctgattatatccgtgatataaacaagatatatattgtggcctgcggcagtgcttaccatgttggagtagttggcaaatatgtgattgagagcatggttcgcatacctgttgaggtaatagtagcgtcagagttcagatattgcaatccgcttgttgatgataagactttggtgattttgatatctcagtcgggcgaaactgcggacaccattgcggcaatgagagaggcaaagcggttaggggcgagaacatttgccatagttaacgctgtaggaagctgtatagcaagagaggcggatgacgttctctatacatgggcaggtcctgagattgctgttgccaccacaaaagcgtacagcactcagctgacagcgatttatttgatgtctatatatatggctcaggaattggatatgctgacccctgaacttttggcaaaatatataaaggctcttgaaaagctgcctgataatatttctaaacttttggaaaacaaaggcgagatacagtatatagcgtctaagtattttaacagcaaaagcgtgttcttcctgggaagaactttggactacgctgtggcgcttgagggttcacttaaattaaaagagatttcatatatccattctgaggcgtatgcagcaggagagttaaagcacggaacaatcgcattgattgaagaaggcacggttgttgtagcgctgtgcacagtcaagaatttgtttgataagatgctgagcaatataaaagaggtaaaagcccgcggagcggtagtaatagccgtagcggaagaggggcatacggaaatagaaaaagaagcggattatgttatctaccttccaaagtgtgacgagctggttatgcctagcgaagtagtagtgccgctgcagttgttttcgtactatgtatcatcattgaaagggttagacatagataagccgagaaatttggcaaaatcagttacagttgaataataaatattaaaaagcctgcgtttgaggtgatccaaaagagttagaccaaaaatctaacaattgggtcggctcatttgcaggctttttttattgtattttaaagttttaacttaatcggcttcccagaaagggaagccgatctcgcccgggttcggcgggcgaaacagggtctggcgcagcaaagtaagtaattaaagaataattaaatatttttatattcgtattacactttgggtgcatttacatagacaaaaggtctattagtacgcagtttacacagtcatatatataattagtatattaattattttaaggtcacagagtataaaaatatgttcgggactgcgcgccttacgtggtgtactccgtacaccctgccgatgcttgctatatacatttttttgtattgacagatatataaaagcaattcttatataacagtaatatcggtgtatagttgctggataaattaattattaacaaattgtaatattgggtcatataaaaggggagcaaaaaagatgaataataaatttttaaatagcaaattttctaagagagaaaaaagaatacgcaaaacttattaaattgaggatgaattatataagtttttagaagaagcttctttaactcacggtgcctctgtttctgatattttatatttatgtatatcagaattagttagaacgaatgatttaaaaatttatactgctcctaatatgaaaaatccattacataattttaatatagcagtcagcaatgtaaaaggtcttgcaaaattaagtgagaccaccccatttactataaaatcattagtaaatatgtctattaaaaatatcatatagttattattatattataatataattcttaaaattgtggctataatcataaaaaattattataaattaattactatattattgtagattttaataacatttgtagtcgtattttgttagtcgcttaactaaaattatatattttattttgaaagtatttgtattaaatagtatgtatgcagattaataaaggtctattgtaaatatgatagatatttaatagcagcaatattattatagcgaagaaaataatatttcaataactacacaaaaataatctgaatatatgaaaacttaattgaaaaacaaaagaaagaagtaatacaaaaggcataataaaaacccgccgttagaaggcgggttttaaataccatagtaaagtatagcacaaacaatatcttaatttatatattttataaggtcaacaagctgaataaactcatgcttaaatccaaattcatcttcaccaacccctgattgcgcttgtttaattacattttcaagtgtagccgatcctttatattctgaatcatttaaaatcattccaagcagggctgctgcggaagcgaacttgaaattctcagacggattggaatttatatttgatcctataggctcttctataagcttgctttcagtgccgtcagggtccttatacctgattttaagatacataagctcgtcagatggttttgcatttgtatcccggtatctgaagtcctgcgtttcagtcccgtctgccggaacaatttcataaaaagcggttacaacagccccggcgccaagttcaccggcatccttttcgtcgttttcaaaatcttcattgttcagtattctattttcgtatcctacaagtctgtattctttaactttagatggattaaattcaacttgaagcttaacgtctttggctattggatacaaagtctttatcatttcatcagctaatacttttttggcctctttgatgttgtctatatatgcgtagtttccatcgcctttgtcagccaaaatttccattctgttgtctttgtaattcccggttccaaaaccaagcacgctgacaaatattcctttactgcgtttttcagtaaccagttgctcaagttctgtagttgaagaaggtccaatattgaaatcaccgtcggtacataatattattcggttgttaccgtcttttaaatttttctctgccaattcataggctttgtttataccatcatatccgtttgttccgccgcatgcctgcaatgaaaatacagcattttttatagtttctttatctgatgcgttaacgctgtctaaaactatattggtgccgtttgcgtatgtaacaagtgatattgtgtctcgttcatcaagtctgctcaggagcaaattcaaagatttttttacgagcggaagtttgttttctgaaaacattgaacctgaaacgtcaatcaaaaatactaaattgctgggtttgcgttcttcgattggaatttcgtctcccttaatagaaatcatagtcagtttattatcagaattccatgggcacacagcagtttcagaggatactgagaaaggtgttccatcttccgggagaggatagtcgtaatcaaagtaatttatgagctcctcagttcttatagagccgtacttcggcacgtgtccatttagaataaaccttctcatgttgctgtaagacgcagtatcaacatcaattgagaaagtggaaaacggtgatgtaagaggatttttaaaaatattttcgtcttcttttgtatattcctctgtgtcaaagcccggataccacggaacagaagaagtgctgttagatgagtttatcgctgaacctccgcctccgtctccgcttccgtttccgcttccgccggatgtactgccggttacactttgttgtggagtgtaattataattgttattattagtctcatcctgtttagctttttctgcattgctgatttcagtttttagatttaaaaagttttttatattatatgcaatattgattgcgtcactgcgtgatatagcttgttcgctaagcgcttgaaccccgtccataagtccgttatctattgcggctgcgatataatctaaaggataatttttattggttgaaataattcctgttgagacagccgcaatctttgcggcttctttaaataaaatgttttcatttggcataaaggcttgattttcatagccgttaataatatttgcgttctttagcggcattatatagttataagcccaaaaatctgaattaatatctgaaaattctaaagaggtatcatcaaagtttagtattgatgaattttctgattcaagaacttcatagattaattttgaaaactcggcacgagtaaccgggctgttaagttgtaaatcgccgttttcattgcctataactattcctgcattctgcatagttttaattgcttcatcgctttgcgccgccatagccgcagaagatgaaagcagcatagccgaagcaaccaataatgaaatctgttttttcatgacataaaacctcccatatgatttatgttatattagacgaatcaatcaaatattagttcccaaaatatgtaaataatatatattttattattcaaaaaatttgattattaactcattaaagctattgattatgttttaaatggaatattacgaacaaataacatattgcaagcgatataaatttattatataaatatgtcaagtttacacatttttatttttttcggcaaaaaaactttagacaaaattttatttttttcttatatttaactcttgcattttattattgaatgtattacaattatactgtatttttgttgttaatttatatttatatatattggaggaattgtaatggaaaaacttgaacagctctacgaaggcaaggcgaaaaaagtatttaagactgacgaccctgaagttttaatggttgactacaaagatgacgcgacagcgtttaacggtgaaaaaaagggtacaatccagtctaagggtattattaataaccgtgttaccaaccatcttatgaagatgcttgaagagcgggggattccaactcatctgattaaagagatttccgatagggaaacattagttaagaaagttacaatagtacctcttgaagttataatcagaaacgtagcggctggttcattttcaaagagatatggtgttgaagagggcaaggagttattggctccaacgcttgagttcagtcttaagaacgacgatttgggcgacccgcttatcaactcttatcatgttttagctttaggtctcgcaactcaggaagaaattgacactatagctgggtacgcgtttaaggttaatgaaattttaaagaagtatttgcttgatttgggaatcaaacttatcgactttaagcttgagtttggtaaaacaagtgacggcactattgttcttgccgatgagatttctccggatacctgccgtttttgggataaggacacaaatgaaaaactcgacaaagacagatttagacgtgatatgggcggtgttgaaaacgcttatgaagaaattatgaaacgtttaatgggtgaaactgtttaaattataaaaatatacagcgtcagctgaaatcgtttaggaggtttcttgtgagtaaacataatgagatttttggttccgattcacttcatgaagaatgtggggttttcggtatttatgatatgggtgataatcttgatgttgcccggcttacgtattatgggctctacgcactccagcacaggggtcaggagagctgcggaattgctgtaaacaatattgacgaggacggaaaaatccaaattctgcaatataaggatatgggactggttcaggaagtattcaatagttttgtgttaaatgagcttcagggctgtgcttctgtcggacatgtccgttatacaacggcaggttcaagcagccgtgaaaatgctcagcctcttgtttccaaatatcaaaaaggtacgtttgctttggttcataacggtaaccttgtggatatagataaaatcagaaaagagctggaagataagggcgcgattttccaaaccaataatgacagtgagataattgctcatctcatggctaaagaacgtattaagactaattccactgccgaagctatgatgaagcttatgggtgaaatcagcggagcatactctctgattataatgacgcctaagcgtatggttgtggcgcgcgaccctcaaggattcagaccgctgtgtatcggtaagataaagaattcttatgtatttgcgtcagaaacctgtgcccttgattcaatcggggctgagtatataagagatgttgaaccgggcgaggtcgttgttgtagacgagaacggactcagttcttacagggatagatgcggacagccgacagctacctgtatatttgagtatatctattttgctcgtcctgacagcatgattgacggcggaagcgttcacgccgcaagactgaatgcaggtaagtatttagctcaggaaagtcctgtggatgcggatgttgtaatcggcgtaccggattcgggaattgacgcggctttaggttatgcaagagagtcaaaaataccgtatggcgttggatttatcaagaacagatatatcggaagaacatttattaagcctactcaggaagaacgtgagtctgcactgaggataaaattaaacgcaatgcgcgaagcggttgacggaaaaagagttataatgattgacgactctattgtaagaggtacaacctcaggacgtatagttcagcttctgcgcgatgcgggagctaaagaggtgcatgttagaatttcatcaccgccgtttaaaaatccttgttattttggtacagacatagccgacaggaaatatttgattgcctgtaagatgtctgtcgaggagacttgtaagcatataggcgctgactctttggcatacttgtctatttccgctttatcaaagattgccgagggaacaaaatgcggcatgtgcgacgcttgctttaccggaaaatatccggtgtatgttcctcaggaaaataatagataattgcccttttgcggcttacagaaaggtaaaacatatgcagaatgaaacaatagtaattatcgactttggcggacagtataaccagcttatagcaagacgtgtgcgtgaagcaaatgtgtattgcgaagttgttccgtactcaaaaactgttgatgaaataaaggctttaaatcctaagggaattattttcaccggcggacctaacagtgtttttgatgaggacgcgccgaaggtggattctcaagtttttgaactgggtattcctatcctgggtatatgctacggcgctcagctgatgagcatgtcgctcggcggtgttgttcaccatgccgatacccgtgaatacggagtgacggatataacactcgacacaacaggagttctttttgacgggattgcagataaaaatcaatgtctaatgagccacactgacaaggtgtattcgcttcctgacggtttcagagttgtggcaaagacagatgactgcccaatggcggcgtttgaaaacgcagaaaaaggtttttatggcgttcaattccatcctgaagttaatcacactccgtttggcaaagatatgataaaaaactttttgtataatgtgtgcaagttcagcggcgactggactatgtctgattacgcaaagaattatatagagtttgccaaaaataaaattggggataaaaaagttctgtgcgctttgtccggcggagtggacagcagcgttgcggctgttctgctctataaagcaataggcaaacagcttacttgtatatttgtggatcatggtctgctgagaaaagacgagggcgaccaggttgaggatatattcactaatcagtttgacatgaaccttgttcgcgttaactgtgaagacagatttttggacaagctggcaggagtgtcagacccggagactaaaagaaaaataatcggcgaggaatttatccgagtctttgagcaggaagcaaagaagattggtacagtagattatcttgttcagggaacaatatatcccgatgttatagagagcggagcaggcgacgcgtctgttataaagagccatcataacgtaggcggcttgcctgattatgttgattttaaagaaataatagagccgctcagaagtctttttaaggacgaggtaagacagctgggaatggaactgggaattccggagtatttggtatggagacagcctttcccgggacccggacttgcaataagatgtatcggagagataaccaaggacaggcttgagatattaaaagacgccgatgctatattcagagaagagattagcagagcaggactggacagagaaataaaccaatattttgcagtgttgacaaacatgagaagtgtaggagtgatgggcgatgagcgtacatatgactacacaatagcattgagaggggtaacaaccacagacttcatgacaggggagtgggcaagaatcccatatgatatattggatatagtaagcagaagaattgtaaacgaagtcagtcacgtaaacagaatagtttacgacataacttcaaaacccccatcaaccatcgagtgggaatgatatcacactcgcctgaaagccagtaactgtgcgggttacaccgttctggatatatcttgtggcaacgttttggcaacacctgcaacataaattgtattgttccataaatatagagctaactgatttgatttatcagttagctctttttgttggggtctttagacgtggaaaaaaaccttcggttctaccggaggaagataaaaagctttagcataagaaaaatctccatgatataatagtaaatggtttggcgaccgcattacaaaaaatatatcatggaggtttttaataatgttaaagaagagcacaaatgaaataaagagcacagcacactcaaaatacaggtgtcaatatcacatagtatttgcaccgaaatatcggagaaaagaaatatatggtcagttgaaaagagatataggagaaatactccgaaagctttgtaaacaaaaaggagtagaaataatggaagcagaagcctgcctagaccatatacatatgcttgttagtatcccaccatatataagtatagcacagtttatgggatatctcaaggggaaaagttcattaatgatattcgatagacacgccaatttgaaatataagtatggttcaagaaatttttggtgtagaggatattatgttgatacagtggggagaaataaaaaaataatatccgaatatatcaggaatcaacttgaggaggattatgcatcggatcaaataagcatgaaagagtatttaaacccgtttacgggtagcaagaataagtaggcaaaaaatacagccgcacgtgagcggctgcctgtgatagtaatgcggtgtcaaacttctgtgctccttacaggggttaagcctgtattagccccttataggggctgtgcaagccaccagtttactggtggtcttgacttaccaaaataaggaggtggaacagcatggagaaaataatatttgattattactatggtaatcaggcggagcagtacagcttttaccgtataccaaaaattctttttaaggataagacgtttaaatcactatcaaccgatgcaaaggtattatacggatttatgcttgaccgaatgggattatcagttaaaaacagatggtttgacgatgaaaacaaggtatatataatctataccttaaaaaatattatggaggatttcgggtgtgccgataataaggcaacaaaattattgaatgagcttgataaggaaacaggaataggcttgatagaacggagacgtcagggattggggaagactgatattatatatgttaaaagctttgttataacgccggagaaccagcacgaatccggaatcgtgaaaatcacgagcaattaatactaatattaataatactgagtataacaatactgataataataaaactgagtatataaatcatcaatcttatctatcgtgtaatacagcaagtgaaactttttcaatggataggattgaggattatgaaaaatacagagagcttgtaaaaagaaatatagagtatgagggattaattctgcatgaggaaaaagaggtaattgacaacattgtggatattatggcggatgttctgacttttccggctgaaagctattatattaaccatgtacagtatacggctcctgtggtaaaaagtattttcatgaaaataaattacacacatatcagcaatatgcttttggcaatgaatgaaaactgtacgaagatacgaaatgtacgcagctatctgatagctgctatttttaattcatacagcacctcagatgtatatattgactggcgtgtgcgctatgatatgaaaaaatgagagagtaggtgatagctattatggagaataaaatattaaaaaccggaaatggagacaatacagaaataatacagactgtaaacatatcagaactaaagccgtatgagcagcagccgtttaaggtattgattgatgaaagtatggaggagattatggagagtataaaacaaaatggggtattatcgcctattattgcaagacctcatagagaaggcggatatgaaattctttcagggcacagacgtataaaagcatgtgagcttacgggaattacatagattccggttgtagtaaaaaatcttgacgatgatacagcggcaattttactggtagacagcaatttacaaagagaaaatatcctgccgagccaaaaggcttttgcgtatcggctgaagctggaagctatgaaacgtcaaggtgaaagaacagatttaacatctgcacaatttgtgccaaagttaacagcacgggaacaatttgctcaagaagctggagtaaatcttatggaaattacaagttacatacgccttacgaatctaattgacccgttacttgaaatggttgacgaaaagaaaatagccttaaatgcagctgttgggttatcctatttaggcaccaaaggaacaggcagaggttctaaattcaatcgaaaaggaggaggcttcaccatctattgcacaggctgcaaaaatgcggcgtttttcacagaatggtaagctaaatcccaatgttatagattctattatgcaggaacagaagccggaaaagattaaaataacattggcaggtgataaggttaaaaagtatttcccggaagattatactgaaaagcagatagaggatgttatgataaaactattagacgactggtataaaaagcggcagcgtaaaaaggaatatgaacgttaaagcggtatctcatgatattaagggataccgcttttatagtggaggattttatggatatccaaagaataaactcaggatatttaattataaatcaaattaaggttggcgaaatagaaattgtgctggatgttcaccccaaattgcctaatagctttgttacatggaaatgtaaaaacggtgactattactattgggggaactatcatacaagcctgttgtcggcccaaaaagatttctgtaagcgtgctctatcagaaataagaaacattgaacagatatataaaaaacaaaagcaaatagaaaacgagaggttaaggcatgattaatagacctgttagcattccgctgttcaattgtatatatcaataataacttaaatataagaaaatcacatttgtgtgcgattcttttgtgcgatagaacgatatacgttgacatttatggtgattattgatataatattttgtaagattaaacaatgtttcggaggtgtcttaaatgaggaaatagcgataggtaatcctttgatgttatctccggattttcccccgccctaaaccgggcatgaacctttcagctcacccggcttgccatcaggaacagaatttatttcatctcaataactctcaacgtggacaaggcttcttaacttattgagtttttctttctgcttttggtcaaggcctaggatttccatatactttctgataatatcagggtttgtagcatgaatcaggtgatgtacatcttcacataccaacaccagattttgataattgtccttgccgcctaaataccgtggcactttgtgatggcaatgaatatcgccaatagaaagcactttgccagatacggcgcattttcccatttgggccgaatacagtgaaagcctgttatcgttgtattcgatagtacggtacagaaccgggttcctcattaagtaatgaagaaccgtcatgtcgattctgtccagattcttatggatttcggctctgccctcgggcatataggaattgattttgcggttcatggactttgggggcttgtgccgtatgtagccaatcgggacaactgcgtgtccggctacatatcggagctgtttgcttttcccataccgttccctgataactttcggaacttcacacggaatcttcctttttctgacctgttttgcagttttaacccgttctttcagtcttgcccgcaggctcttgtggacagataaggcgaatggcgtaaggtcatcgcagacctttgtggctaattgatagtagtcatggattcccattacataaacgttgtagcggcaaatcgcctgatattcagtacgtttgccttgtgacgggaactcaatgtcgtaaatcagccgttttaagtttggttttattttcgcaatagatttctctctgatatggctctctactacatatttggcgcgtccgttgctccgtttcccacgggggataacctttaacttgaaaccaagaaactctgaatactgctctttcaggttaatcaccttcgatttttcaggactgatttcaagagaaagcctttcatggagccagcttttggttgcgtggaataacttcaccgcattttgatagctgttcgtgaatatcttaaaatcatcagcgtatcggacgcaggtgacttctttcagccttgtcctccgcagtgcggcaaatttatggctcttgctcacgcttccgttgtaattgaccgattccttgtaagggaactccgttggtatttcttcccattggctggcaagccaccaatccaattcgtttagaactacattggatagcaggggagagataatacctccctgcggcgtacccacctccgggaatcctatcccggccacctccgcttttagcatagctgatataatactaagcagcttcttgtcttggattcccattgtccagagctgtttcagcagttttccgtggttcacgttgtcaaagaaccccttaacatctatgtctacgacatagtggagattgcttctctgcatatttttgtgaacctgggcgattgcgtgctgttggtttcggttagggcggaatccataactgtggtcgtggaatttcgcctcacatatcggctccatgacctgcaatacgcactgttgtatcagcctgtccataatcgtcggtattccgagcgggcgcttcttcattgggtcatttcctttcggaatttctacccgccggacgctttgtgggacataccagtttaatttgcgctgtatggcgcatataagctgttcatcagagagtgctgataattctgtgattgtttttccatctgtgccgggcgtcgtactcccgtggttcttcttgatgttgcggtatgccagccgtatgttttcgggtaatgcaatgatttcaaccagatgtttgaaaactttgcctttattgctgtcggcatacagcttatcttgaattgcctggaagtcataatactcggcgtgccttaacttatctttcttctttgcctttcctgttgccatagtcggttacttatccccactttcgtttggattttcgcctttcttagtcctactcgaacctatgcgtgtttattgaatatgattttgtttctgttcctgactacagcccgtccctccaccgcttactttgttcacggcttcacaggtagcatggctgctctttcctcccggattaagaacggttataccgcacctcccataaaaggcggcacgattttcccgcccattgcttcatcatgcgtatccactccacatccggggctttccacgttccgatattcctatctttgcataatacccttaaccctgccctttaggcctgtatgcctgatggtgcctgtaacaccatagggaatttcatatcgacaaatcttactttaccccacatacgccgttttcacggctatggcatttctgccatatcccgttatagacctgtacattcgggcttttgtcagcggtagtcagccgcattctggacataggtactttatagacctccggcctaacacccccggccacctctggctcggctttgctttatcccccaaaggggacagtcgcgggtgcagacagccgacttcagcgtgctgtgtcagtcgcgggaaatacgtcccgtttcttccaacgcagtatcaagggaagcgtttcagggcgttaccccgccattccacttctcggaatatcagttagaaaggctatagcctttccgtcacttttacctctttgcaggaaaatcccacgcagagtttatatgcgacaacgtgtcgctgcactgtcgaatggggctaacctcgcgccgcatgagataagtatgctttttgcggtcttgcccgccgcaagtttgtattttttgtactgcttgactgcaaaatgttccgggtctttttcttccagacgttcaaacatgaggtcaaccgggttctggaaatcctcgtcgtcctcgcgggcttccgacgcatttatcatctcaagcagcgtcgtgaagttcttctcgtcctccggggcttcataccagatgtagccgattagcgcggtgtagtagagcttttccgctttcacccagaaatcctcgccggatttttccccgtcgcctttggtgttggcgataatggtattgactaacttcaaaatgtccttttcgctccgcagataggcaaagggattgtatttcatggattttttgaagttaatcgtatttagcactttgatacggtatttgtaccgctgtaacattttcccggtttccaaaatcagtgttcctttcgggtcagtgacgatatacgacgttggaaaatcctttgacgtacattgcatgagcgacggtttcacaaagaaccgggtcttgccgctgccggaaccgccgattacaaggatatttttgtttcttgcgtatttcggctgcttcgggcggctgttcatggtgagccgttccgtctgcgttaaggggatattgttctcaaataccgggtcggtgtacggctttatgtcgtcagccccgccccaacgcgccgaaccgtattctgtcccgcggcggtatttcttcgcgttcttgcctttggtgtagataatcagccggacaatgaccgcccccgcaatgcctaaagctaagtctgccgggtggaagctcggcgcgatactggaaaaggcggcggtaaaaccgtccccaagatgtagcagctttgcgcttgcgtccgcgccgggggagagccggacagccgcgcccactttatcaaagagccagacaaagagcagatacgggagatttaggataagcagcttcttgatttccggcttcatagcgatacctccctgtccttgttcttgacctttgcccgttccgcgtttctgccctgtgcagcttctttgagggtagagagcagctttcggattgagggctttttctcctgtgtcagcttttttgcggaaaattccttaaaggctgcggtcagtacgtccgcgtcccgccccttgaagaaaaccagatagcggggcgggctttccgtcgcgtcctttttcagcgcaaagtcgataccgtactttttcgccgtactctcaaaggctttgatattgccctcggtaatctcaatgttggaaacgcccgcgttctgcttcataagctgctttaagctctgcttgccctgtggcggttttgcaagctgctttttgccctttgacagtatggctttcattgccttttggagcgtctgcgcggtcagcttcccggtcttgatgtaaagggctatggtcttttcgtttacttcgtcctgcaatttgtcgcgtcctcctttcgcgtttctttatggggcggcggtcagatacgcacccgcagcccgttcaagtcctcggctctgatacccacaagataccagttgtcgccgtactcaatccgggtcggcttccacttgccccgcacgaatacgtcaaagcactcgccgcaatgcaagcccccgtagtagctgtttaagtcaaagcggatgtcgtaacggtcggtgcgctcgtcaaataccaatgctcctgtcattttctgtgccataataaaatcctccttttgtggttgtgggtggttacaggctttcgccctcattgcatgaataatagtccgggtcgccgtactgcggctttttcggtgacagtgcgccgcttgccatgtcatgggcgacaagggaagtgtagtagttgccgattgtggacggggcgttgaaaagggcggctttcagatattgcttgatgttgcggattttggttgtgttctcccgcatacagtcaagcacaaagcggatatgctcgccgtctagtttcataaactttgacttcacaagctctgccgggtagtcgtcccccgcaatccgtacccgctttctggcggtgcatacggtttcaagcatgaggtctacaatctcgtccagcctgtcactgtcaaacttcatgtcctgtttgagaatgtggtagtcgatattgtccttgatgatttcccggtatatatcaactgcgctctgtgctgccgcttccgttcctttccgttccggcggcgcagccgcttctctgcaaggagaggggttaggggaaaggataggaatggaatgggtacttgataaatctgtatttgatttttctttttttggtaagtcagttctttgtatatctttatttaattgcgttggattttccaacgtaggtttttccaatgttggtttttcctgcattggattatccaatgttggattttccaatgtaggtaaatccggcgtaggcggctgcggctgctcgaatatcacatagtccgcgccccgcaagcgtcctttctcgtcgcgctcccttgaacggacgatatacccggcgcgttcaagttccttaatggcttcgcggatagcgtctatcttctcccggttgataagggataagcctttcaaggtgtagtcccaatcttcggggagtgacagcatttgcgacaacagcccctttgcctttagggaaagctccttgttgcgtaggtggtggttgctcattacggtatagcccttgtttcgttccactctgaaaactgccatagttcatagctcctttgctttggatttgttacgcagtagaagcgcggtttcgggggataaggtataaatccctttccgcgccagatacgcgcccggaaaaccgcttgtagcaaggctttttctgcccctactgcgtaacaaagggcatgaaaaaagcggcgttcctgttctcccatgtagagagtaagaaacgccgcttctgcgtcgtattcagtttttagtacaataccctgcttgtccgtcgctcgaaaaaccttgattttccagtgttttcaaaagtatcgttatctaacgtcagcttttgaaagaccggactttaaacgtatggttgcagatatagaaaaaggattaattaacattgttattgtaaaagattattgtgcgataataggactaaatcagaaagaccttgaaaaccaaggcattctggcttagtcccttctttttttgaccgaaaacaaaggactttcacaataatcaagcaagccggagggtgccgctgcacacttccggcagaaggaggatatagtgggtgctatcaaagtcttcttgaaggaagttgtgcttccaatcgcgcttgcgttctgcctcgcgtcatttctcaagccgatctatatgcctgacggcgtatgcgactacttcctaatgtggatctgcgtcggcttgccattcggcatccggaggatgtgcctctggctcgttccaagcggttacggcatctccggctcagtcggcattttcgcattgaacttaatcataggcggtctcatcggaggactcgccttcttcatcgggctgctgctcggtatcattcataccatccgagaaatcatctgaactacatcgtaaacgaagagggtttgtttcttctccaatttggagtaagaagcaaaccctctttttttgttgcccaaaagccggagtatttgctggcgatgcggcgaaagaaaggagtttttaagcatgaaacgcatgacagccggtgatcttcaagcactggaattgctgatgcagaccacacccggctttgagcattttgacagcggcgcggatggcattctccctgagtgccgaagctgccgctttcatcgccccttctggaaatatcagtcctgcgtgtttgcagagtgtccctactgctgcaatcccgtttctaccctcaaaaaccaaagtggcacatctgctgccggaaaggaagtcaatcatggataacaaaatcgaagtcttcaagaatgaacagtttggagaaatccgaacagccctgatcgaaaacgagccgtggtttgtggcggtagacgtatgcagggctttggagatcggcaattcgtcacaagccatttcacggctggatgcggacgagaagatgattaccctcatttcaaatgagggtaataaacgaggcaatcccaacatgacggtggtgaacgaacctggactttacacgcttattctgagcagccgtaagcccgaagccaaagccttcaaacgctggatcacacatgatgtcatccccatgatccgcaagaccggcggctacatgacggactcccttctggaacgtattcagaaggaaccagcggtcattgtggagtttgctcaggcgttgattctggaaaagaatcgcgtaaaggctcttgagtgtgagctgaacacggcaaagcccaaagccgattactacgacgccttcatcaatccggatgactgcaccaatatccgaacgacggcgaaggaactgaaaatcccggagcgcaagttcgtccagtttcttctcagggagaagtacctgttccgatctccctccggtcagcttcttccctacaacaaggacagcaatgccggactgtttatcgtccgcgattttgtgacgtactgctacaccggttctcagacctacttcacgccgaagggcaaggatgtcatccgaatgaagttccagaaaaagtgcggcgaagagctgctttccaagatggcaaggtgatttctgtggcagtctatcgcgtaaacaagaatcgtggctatacggtcatggcgaacttccaccttcgagacaagagcctgtcactcaaggcagtcggtcttctctcaaagatgctctcgtttaatgatggctggaagttctcaaccaagggactttctgcaatctgcaaggaaggtccggatgccattctctccgcgctccgtgagcttgaaaagcacggctaccttgtccggcaccggcagagagacggtaaaggcaggatgagcaacacaatctttgagatatacgaagagccgcaggagtctacaccagaacgggaaaagccacacacggaaaatccatgtgtggagaagccagatgtggataatccacgcggggataagtacgcacaaataaatactgatcaagtaattacccaagaaagaaatactctctcaaagaactatcaatccatcaatcttgatgggatggacaggatggatgagcgaagcgagtatgaagagattatcaaagagaatcttgattacgacattctctgtcaggatccgaagttcgataaagaccgcttccgggagatcatggacatcatgctggatgccgtctgctctaccgctccgaccatccgtatcaatggcgaggatatgccgcagcaagtggttaagtcccgctttctcaagctgaatagcagccacattgagtacgttctggaagcaatgaacaagaacccgtcagacatccgtaatatccgggcgtacctgttgaccgctctgtataacgcctctctgacgatagacaattactactccgccctcgtcaaccatgatttctacgggcaggacagatcagcagggtcaaagaagccgaagacctacgattatagcctttgtgaagacactctttaatgaataccatcgtgagcattgctcggaaaggaggacagtgtaaatgaaaatcatctatcgccggattgtgccgccttagcgtcggcagcagtccccataatcattccaaggaaaggaggtaaacgcagcaatgcaggatgaagtcaacaccaaagttgttgcaatcatgatcaagggcggtaaaatctccgctgaggtgctgaaaaaggctctggacaagttcgttcaggagatcgagaaggcgcagaagcagatgaagcagcctaaaacctatcgcggcaagcagtccatcaagcatctgatgagccagaatgccgccatctccaacatcgaagtgacggatggcaacatcaaatcctttgagcggaccgccagcaaatacggtctggactttgcgctcaagaaagacgtttccgttgagccgcccagctatcttgtcttcttcaagggacgggacgttgatgtgatgaccgccgccttcaaggagttctccgccaaaacggtcaagcagaaggaacagccgtccatccggcacaagctggatcaggagaaagcccagagcaaggcgcagcacaaggagaaggtcaaggtcaaaaccaaggatcggggtgtggagctgtgaacaaacccgatgtgaagaagctcattcttctgaaccttccgtatgtcttcgccttctacttcgcggataagatcgccgccgtgtttcgtctcgcccccggcgcagcgttcatcgacaagctgacaaacggctttgccgtgttcggctctgcctttgcaaatccgctgcccagctttcatcccgtcgatcttctcatcggtctgtcggctggcgtgctgctcaagctggcagtctacgtcaagggcaaaaaccgcaagaagttccggcagggcgaagaatacggatctgcccgctggggcaagccagaggacatcaagccgtacatggacccggagttctccaacaacgtcattctgacgcagacggagttcctgaccatgaacagccgtccaaagcagccaaaatacgcccgcaacaagaacatcctcgtcatcggcggttccggctcaggcaagacgcgctttttcgtcaaacctaacctgatgcagatgcacagcagctacgttgtgactgacccgaagggtacggtgctggtggagtgcggcaagatgcttgaaaagggcggctacgtcatcaagtcgctgaacaccatcaatttccggaaatccatgcactacaacccgttcagctacattcgcagcgagaaggacatcctcaagctggccaatacgatcatcgtcaacacgaagggagacggcgataagtccggcgaagatttctgggtcaaggcggaaaagctctactacacagctctcatcggctacatctggtatgaggcacccgatcacgagaaaaactttactaccctgctcgaaatgatcaatgcctcggaagccagagaggacgatgagaccttcaaaaatcccgtggatgtcatgttcgatgaactggaagcccgtgacccggatcacttcgcggtcaagcaataccgcaaatacaagctggcggcgggcaaaaccgccaagtcgattttgatttcctgcggtgcaaggcttgcgcccttcgacagtgcagcgacacgttgtcgcatataaactctgcgtgggattttcctgcaaagaggtaaaagtgacggaaaggctatagcctttctaacgacagtgcagcgacacgttgtcgcatataaactctgcgtgggattttcctgcaaagaggtaaaagtgacggaaaggctatagcctttctaactgatattccgagaagtggaatggcggggtaacgccctgaaacgcttcccttgatactgcgttggaagaaacgggacgtatttcccgcgactgacacagcacgctgaagtcggctgtctgcacccgcgactgtcccctttgggggataaagcaaagccgagccagaggtggccgggggtgttaggccggaggtctataaagtacctatgtccagaatgcggctgactaccgctgacaaaagcccgaatgtacaggtctataacgggatatggcagaaatgccatagccgtgaaaacggcgtatgtggggtaaagtaagatttgtcgatatgaaattccctatggtgttacaggcaccatcaggcatacaggcctaaagggcagggttaagggtattatgcaaagataggaatatcggaacgtggaaagccccggatgtggagtggatacgcatgatgaagcaatgggcgggaaaatcgtgccgccttttatgggaggtgcggtataaccgttcttaatccgggaggaaagagcagccatgctacctgtgaagccgtgaacaaagtaagcggtggagggacgggctgtagtcaggaacagaaacaaaatcatattcaataaacacgcataggttcgagtaggactaagaaaggcgaaaatccaaacgaaagtggggataagtaaccgactatggcaacaggaaaggcaaagaagaaagataagttaaggcacgccgagtattatgacttccaggcaattcaagataagctgtatgccgacagcaataaaggcaaagttttcaaacatctggttgaaatcattgcattacccgaaaacatacggctggcataccgcaacatcaagaagaaccacgggagtacgacgcccggcacagatggaaaaacaatcacagaattatcagcactctctgatgaacagcttatatgcgccatacagcgcaaattaaactggtatgtcccacaaagcgtccggcgggtagaaattccgaaaggaaatgacccaatgaagaagcgcccgctcggaataccgacgattatggacaggctgatacaacagtgcgtattgcaggtcatggagccgatatgtgaggcgaaattccacgaccacagttatggattccgccctaaccgaaaccaacagcacgcaatcgcccaggttcacaaaaatatgcagagaagcaatctccactatgtcgtagacatagatgttaaggggttctttgacaacgtgaaccacggaaaactgctgaaacagctctggacaatgggaatccaagacaagaagctgcttagtattatatcagctatgctaaaagcggaggtggccgggataggattcccggaggtgggtacgccgcagggaggtattatctctcccctgctatccaatgtagttctaaacgaattggattggtggcttgccagccaatgggaagaaataccaacggagttcccttacaaggaatcggtcaattacaacggaagcgtgagcaagagccataaatttgccgcactgcggaggacaaggctgaaagaagtcacctgcgtccgatacgctgatgattttaagatattcacgaacagctatcaaaatgcggtgaagttattccacgcaaccaaaagctggctccatgaaaggctttctcttgaaatcagtcctgaaaaatcgaaggtgattaacctgaaagagcagtattcagagtttcttggtttcaagttaaaggttatcccccgtgggaaacggagcaacggacgcgccaaatatgtagtagagagccatatcagagagaaatctattgcgaaaataaaaccaaacttaaaacggctgatttacgacattgagttcccgtcacaaggcaaacgtactgaatatcaggcgatttgccgctacaacgtttatgtaatgggaatccatgactactatcaattagccacaaaggtctgcgatgaccttacgccattcgccttatctgtccacaagagcctgcgggcaagactgaaagaacgggttaaaactgcaaaacaggtcagaaaaaggaagattccgtgtgaagttccgaaagttatcagggaacggtatgggaaaagcaaacagctccgatatgtagccggacacgcagttgtcccgattggctacatacggcacaagcccccaaagtccatgaaccgcaaaatcaattcctatatgcccgagggcagagccgaaatccataagaatctggacagaatcgacatgacggttcttcattacttaatgaggaacccggttctgtaccgtactatcgaatacaacgataacaggctttcactgtattcggcccaaatgggaaaatgcgccgtatctggcaaagtgctttctattggcgatattcattgccatcacaaagtgccacggtatttaggcggcaaggacaattatcaaaatctggtgttggtatgtgaagatgtacatcacctgattcatgctacaaaccctgatattatcagaaagtatatggaaatcctaggccttgaccaaaagcagaaagaaaaactcaataagttaagaagccttgtccacgttgagagttattgagatgaaataaattctgttcctgatggcaagccgggtgagctgaaaggttcatgcccggtttagggcgggggaaaatccggagataacatcaaaggattacctatcgctatttaaggaagtccgggaaatcaccatgtatgacgagctggagcttgacctggtgggcgacaggaaaacggcgctgttctttatcatcagtgatacggacgcgacctttaatttccttgtcagtatggcttatacccagctattcaacctgctctgtgagcgggcggatgataagttcgggggcaggctcccggtccatgtgcggtgcctgatcgacgaggcggccaatatcggtcaaatcccaaacctggaaaagctgatggcaacgatccgttccagggaaatatccgcctgcctggtattgcaggcacagagccagctcaaagcgctttataaggacaacatggacacgatcataggcaactgtgattcttctcttttcctgggcggtaaggaggaaaccaccttgaaaagctggaactccctgctggggaaagaaaccattgatatgtataacaccagcgtcacgaagggcacccaggaatcccacgggcagaactttcaaaagctgggaaaagatttgatgtccgttgacgagcttgcggtgatggacggcggaaaatgcctcctgcagatcaggggcgtgcgtcccttcctgtcccggaagtatgacattaccaaacacccgaattacaaatatctttcggattttgacgaaaagaacgcctttgacatagagaaatacctgtctacaagactgcctgtacgtcccggagagctgtaccccaactatgagatcacgccggaagaactggcagcgcagacaagcgcgtaaaatcccgccgtatcatttccttattgtatggcgggtttttctataccatttggaaaggaggcgcctattgcggattcgtgattctccctgacaactgaatatcccccgcaggtcttgtcctgccccttatgctgccgtcatgtttttgtaggttttctatttgaacatggcggcggcttttttcgtttccggcccaatgcggccacaacaataaattctatgaacattaaggaggattaactttatggctttttttacaagcgcgattgacacgctgaaaattctcgtgatcgccctgggcacgggtctcggcgcatggggtgtcatcaaccttttggaaggttacggcaacgacaaccccggtgcaaaatcccaggggatcaagcagcttatggcgggcggcggtatcgccctggtgggtgccacgctgattccgctcctgtccggcctgttcagttaatagccgatgggcagtctgtttgattggataacagactggatcaaagagggcctgatcgaagcgatcaccgggcagtacaccagtatttttgaatcggtaaacagccaggtcgcagatgtggccgggcaggtcggacagaccccgcagggctggaatggcggcgtgttcagtatgatccagaatctttctgaaaccgtcgtcattcccattgcgggcatgatcctgacctttgtgctggtatatgagctgattcagatgattttggaaaagaacaatatgcacgattttgatacgttcaacatcttcaagtggatcttcaagacctttgtagccacctacctgctcaccaactgctttacgattgtcatggcggtgtttgatgtcgcccaaaatgtggtatcgcggagcgccggcgtgataaacggaaatctggatgtcacggcggcgctggctgacctggaaacgcagcttgaagcaatggggatgtgggagctgatcggcttatggctggaaaccaacatcatcaacctgtgcatgtgggtactgtctattgtgatctttgtcattgtctatggccgcatgattgaaatatatctcacggtcagcctggcacccataccgttttccacaatggcaaaccgtgaatggggacagatggggacgaattaccttcgttccctgttcgctctgggattccaggggttcttaattctggtatgcgtcgcgatctacgcggtgctggtccagtcgatcccctcgtccggcgatattcacggtgcgatctggggcacggcaggatataccgtactgctggccttcgccctctttaagacaggctcgttatctaaaagtatattcaactcgcattagtgggtaacaactacattttaacaaggaggaactttcattatgagtaaaaccaataccgaacccatgcagccggacactcaggcgtccgaaggcttgaagctggatgtaaccgtgcgcccgattgccccgatggggaacctcttggcctttgccaacgtgacgattggcgactgtttcaagatcgacggcttccgtatctgctccggcgagaacggcctgtatgtcaacatgccttccacccaggataagcagggaaaatggagggatgtgtgctggccggtgacggcggactttcgcaggcagctcaacgacgccctgatcgaagggtacggccaggcgattgaaaatttgcagaccacccttgaagcgaccaggggcgcggcggaaaagccttccctgaccggcgccctgaaagaaaatgccgggaaggtcaagacgcagccggcaaagcccgcacctaccaagagtgagcaggcccgctgatggcggaggctaagaaatatggcattgtgtacgcagacccgccctggcgctatgacatgaagcgcggcaaaggcgtggcggaaaaccattaccccaccatgagcatggacgaaatatgcgcactgccggttgcagaccttgcggccaaagacagtgcgctttttctatgggctaccttcccacagcttaatgaggcgttccgggtgatcgaggcgtggggcttccagtataagaccctggcgtttctgtggctgaagcagaaccggaaagccgataactggttttatgggatgggcttctggacccgctctaacgcggaggtgtgcctgctggcaacacgcgggcacccgaaacgccagtgtgcgggaatccaccagtttgtgatctcccatatcgagcagcacagcaagaaacccgatgaagtgcgggacaagatcataaagctcatgggcgatcagcccagggtggagctttttgccaggcagcagacccctggctgggatgtatggggcaatgaagtggattgcagtattacaatgccgcaaaacggataaaaaagattctcgcagatcggaggtgacaacgaaatgccttatgtacccgtacccaaagacttaaccaaagtcaagaccaaagtagccgctggcctgacaaagcgccagcttatttgtttcagtctggccgcgctggtggggctgccggtatatttccttacccgcggcgccatcggcaattcggcggcggtgctccttatgatcggcctgatgatgccctttttcttctttgccatgtatgagaaggacgggcagccggcggaaaagctgttaaggaaccggctccgctataagctctggccgaaggaccgcccttaccggacagaaaacttctacaaatccatatccaaaaaggaggtatcacagattgccaaaaaccagacagcaggaggcgcaggaaaaacgtctacaaagaaacgtaaagcaggcaaaaaagacccgcaccgaagcaagaaaggcaggaagtaaaactgcctctcctgccgggccgaagaaaaagcccggctttttttccgggctgaaagcggacgccccgcagacggtccagcagagtattccctataaggaaatgtaccgggacggtatctgccgtgtgagcggcaattattacaccaagacggtgcagttctttgatattaactaccagctcgcacaggcggacgacaaggcgcagatttttgagggctactgcgattttctcaattactttgacgcctcgatccatgtgcagctcaccttcatcaaccagcgggccaatatgcaggactttgttcacagcatagagattcctgcccgtggcgacgagtacgacggaatccgcagggagtacgcggatatgttaaagaaccagctccaaaagggcaacaacggccttaccaagcggaaatacatcaccttcgggattgaagcggaggaccttcgcacggcgaaaatgcgtctggaacggatcgaaacggacgtgctggggaacttcaaagccctgggcgcgcaggcaaggtccttaaacgggctggaacgtctggagcttctgcacagccagctccacccggacggccaggagaaacttcattttaactggtcggatttgccgaaaaccgggctctccacaaaggactatatcgccccttccggtctctccttctcccaggacggcaagaccttccgggtgggcgaccattccggcgcggtgtccttcttgcagattttggccccggagctgacggatcggctgctggcggaactgcttgacctggatgacgccgtgacaatcaacctacatatccagtctatcgaccaggcccaggcgatcaagaacatcaaacgcaagatgtctgatttgcagaagatgacgattgaggaacagaagaaagcggtccgctccggctatgacatggacatcatacctaccgaccttgccacttatggggaagaagcgaaaaatctcttgcaggatttacagagccggaatgaaaggatgttccttgtgacggtgctggtggagaatatcgccccgaagcgcaaaaagctgtttacggatattttttccgcttccggtgtggcgcagaaatacaactgtgccctgaaacgtctggacttccagcaggagcagggccttatgtcctccttatgcctggggcagaaccagatcgagatcgagcgggggcttaccaccagcagcacggccatttttgtgccgtttaccacctgcgagctgttccaggagggtgaggctttgtattacggtctcaacgcccttagcaacaacctgattatggcgaaccgcaagaacctgaaaaaccccaatggcctgtttctggggacgcccggcagcggcaaatctttctctgccaagcgtgagatcgtcaatgtgttccttctgacggaggacgacattatcatagcagacccggaaaatgagtacgggcctttggtaaagcagtttggagcccaggggcagatcattgacatttcccctaactccactaactacatcaatccgatggatataaacctggactattcggacgatgaaaacccgatcaccctgaaaagtgattttatcctgtctctgtgtgaccttatcatcggcggcaaggaggggctttcccctattgaaaagacgatcattgaccgctgcacaaggcttgtgtaccgggactatttgcaggacccgcgcccggaaaacatgccgatcctgggggacctgtacgatcttcttcgcaaacagggcgagccggaggcgcagaatatcgccacggcgctggaaatctatgtcaacggttccctaaatgtatttaaccaccgttccaatatccagatggataaccaccgggtactgtgcttccagttgaagtcgctgggaaaggccctgaaagagatcggccttcttatcatgcaggacgcggtatggaaccgtgttacggccaaccgctccaagcataagacgacctggttctatatcgacgaattccacctcctgctgaaaggccagaccggaagtttcagcgtggagatatggaaaagattccgaaaatggggcgggattcccagcggtttaacgcagaatgtgaaggacctactggcttccagggaaatcgagaacatttttgagaactcggattttatctacatgctcaaccaggcccagggagaccggcagattttggcgaagcagttaggcatttcgccccaccagctttcctatgtgacccattccggccccggcgagggccttttgtttttcggcaacgtgattattccatttgtcgatcacttcccgaaggacacccttctgtattcggtccttaccacaaggccggatgaagtggcaggcgcatgagcgccggcagactaacaaagataattcagactggaggtgatggatatatcccgtgataaagaattcagacgggcaaaagacgcggcccggcagccggcaagaaaaacggaaagcgacgtccgggccggcgaggtgcgcggcccggattttgatctgcgccgggcccgtgacgcgcctgtgcaggaagataaccgctataaagggcggaacctgtatcaaggggcttcggaggacggcgcggttccggcagcggattccagtgtggattctgctgcttcccggcagtcgtccgggggttctgacagcttcattcaggacagccgcggcgatccgcagcaaagcgggccggatttttccgggcgtgacagcttccgcgaaagcaggcagcaggattccgggcacagtgattccggcaggtttcagcgccgggatgcagatttttccaggcgcggcggccaggagttgtctggctttggcaattcggaggctggcagtacaaatgccggggaaacaccgggcagacgccggacgcaccagcacggcaacaaataccagcagcgtttccaggaggcggcaaaagccgaggaaccccaggagaaacagccgggggcagccgaaggagaaccgaaacggccttccaagctggaatttaccgctgacgagctgccaccggaggcggcggataaaaagctgacccaggcaaggcgcagggccgagcgtgtggaaaagaagctggaggacgccgaggcgcgtctgccttcccggaaaaaactgcggatggagacggcttccgacccggagaccggcaaagcaaaaaagcggctgaaatttgagcaggaagtaaaatcccagcgggcgcatgtaaagggctcccttcccatgcgcccggtaaaggccgctgcaaatacggctgtcggttatgcgcataagaaaatctaccaggcggaggaagaaaatgtcggcgtgaaagccgcccaccgcaccgagcttgtgggtgaggcctgggcgcgcaccctgtaccaccgccataaaacagcgccataccgccgggtaacaaagttacagcagaaatcagcgagggctaacgcgcagcttgcctaccggcagaccctttcggaacacccggagctaaagaaaaatttccttgcccggatgtggcagaagcaaaagctgaaacggcagtatgccaaagccgcaagggaggcacagaaaaccggaaagcgggcaaaggacgcagccgtcaccacggaaaagatcgctgtctctgttgtaaatgctgtcaagcgccacccggtgatctgcggcattctgctcctgttgcttttggtggtatttctcattacttcgctgttttcctcgttttccaatatcgggaccgggggcctgggaagtatcgccgcctctacctatctggcggaggaccaggacatcaacaacgcggagcttatctataccgagtgggaaacagacctgcaaatggaaatagaccgtgtggagacagaccggcccggttatgacgagtaccgctataacatcggcgcaatcgagcatgacccctatatcctgatgggctatctcacttctgcctatcagaatttcacctatgagcagatcgagggcgtcctgcggcagctttttaatgagcagtattcccttacctttacggaggaaacggaaatccgctaccggacagagacccatgttgacccggagaccggcgaggaaaccgaggaagaagtaccgtatgagtggcacatcctgaatgtaaagctcacggccacgcctcttgcaaacctggtggtgcagcgcatgagcgccgagcagaaagaaatctttgagattctattgcagaccaagggcaaccggcagtatgtgaaaaatgtctttgggataaactggctgccctatgtcaccagctactacggctaccgggtacaccccatcagcggggaaaagaactaccataccggcgttgacatcggcgtggcccagggcacggaaatcttagccggccatgacggtacggttacgctggcaggaaacgcgggcggctacggcctgtgtgtcgccattgaaggcgaggcttacgaggggcatacccttaccacgaaatacggccactgttcacagcttcttgtgtccgtgggccaggaagtaaaggccggggatgtaatcgcgaaggtcggcagcaccggcaattccaccgggccgcacctgcacctggaggtattggtggacgggcagtatttgaacccgctgtattttgcggataccggcgacaccggcagtaccgggctgccagccattggcgcaggcggaggcggcagctactttgattacgatattccgccggaggcccttgcggatgaacagttcgcggccataatcgcggaggcggagaaatacttaggctatccgtatgtgtggggcggcgcaagcccttccacttcctttgactgttcaggcttcgtttcctgggtagtcaaccataccggctggaacttcgggcggcttaccgcggacgggcttttaggcgtgtgtacgcctgtatcgagtgcggacgcaagacctggcgacctgattttcttccaggggacctataacaccagcggcgcaagccatgtgggaatctatgtgggaggcggcatgatgatccactgcggggacccgatctcttacgcaaatatcaatacaagttactggcagcagcatttttacacctttggccgtctgccttaacagaatggaggtaacaacttgaaccctaaaattgaaaaactggcaaaagacattgaaaagaccaaggcgaagatcgcggagcagcaggccaggctccgggatttggagaaacagaaaacggagctggagaacaccgattttgtggcggtggcccgcagctaccacctgacgccccaggaactggccgaattcttaaaaacgcggcagatggcgcaggagccttcgccgcaggaacaggaggaagtgcatgaggactaaacgaatctctctccttatggcgcttgtctttctcataggcgccatgaccttgcccatgacggcttttgccgccggggggaaggacaccacgccgcccacgcttacggcggtgctggatggggaaaccgtaaagatcgtaagcagcgacgacaattccggcgtggaggcggtctatattgacaagacccgtgtcaattccctggtagacgggaaatcctctgtcgcgctgaaggattatgccggcacagataaaaaagtgagcgtctacgcggtggattatgccggcaaccgttctgatgccgtgcaatttgacaacccctattacaaggaaccggtgtccacggaaaagccggctgccaccacacagcccagccagagcagcaccccggcaacaaaaccggtacagacccaggcagcttcttccggcagcacgggcacccaaagcagcagttccaatacgggaacggcttcgggcggcacaagctcccagggcggcagctccggcagtacaggaaattccggcacaccggagcccaccacttcctccgtcccggagggcgctttcaccccggaggggaccgggaccgtgctggacagcgccaccggcgaggatggggataaacagttttacaccattaccaccgaggccgggaatgtgttctaccttatcattgacggcaagcgtgacgacaacaacgtttactttctgaatggcgtcaccgaggcggacctgatggcccttgcggaaaagagcgacggcagcgtgagcgtgatcccggctgcggaggtctgcacctgcacggagaaatgcgaggccgggcaagtcaatacaagctgcccggtctgcaagaatgatttaagcggctgcaccggaaaggaaaagccggcagagccggaggaaccggctgaaccggaacagccaaagaaagataccggcagcgtcggcacgatcatctttatcatcgtcgccctgcttgcagtcggaggcgtcagctattatgtgaagatcgtgcgcccgaagcagcagacggcggacgaggacgaatttgacgaggacgacggctacggggagggctttgacccggacgaggcttacggcgaaccggaatatctctccgaggatgactttgaggatagcacccatgaggacggcgagtaatgcgccgtccttacctattttataaaagtgaggtctttctatcgtgaatatgaaaacgaatacacaccgccgcggtttgcacaggatcgtggcatttttactctgcgcggtatgcgtctttagtctgcttcccgcccaggcgtttgcggcaggcgtgggccagaaggcaagctcctggctgggcgaccagtatgtaggttctgacgggcagcattattattccccggcgcctaccaatttccttgcttacaattcagacgggaccacggataaacgttccggctccggcggcagcgcctaccggcactacatgctgacagattcggacggcgtgacccattcggtctactgcgtggagagcgggattccctacaacacttccgaaaatacctatacttcggagaacgggaccaacagcgattacctgaatatgctcccttctgctgccaagcgcggcattaccctgacggcgatctatggctggaaacccggcgcctcccttcctgtttccgggatcaatgaggacgattataagattgcaacgcagatcatcctctgggaataccagcaacagcttcggagcgacccctacaacagacacagtaacggtcatgcttcggcggaccagtattacagcgtggttgccgggcgtcctgcggaaaaggcatacaactggattctggaacaggtggcgtcccactccaccgtcccttcctttaccgcggcgaataagggggatgcccctgttctggaactgaaatgggacaccagcagaaaggtctataccctgactgttaccgacaccaacaacctgaatatcgacctgcaaatgctttccggcagcggcgtgaccgtgagcaggaacggcaaccagtacaccttcaccagcaagaacatgattatggatccggtgagttttgagttcagaaaagatattccggttgccaatgacatgctgatctggggccgccctggttatcagaccatgatgaccggcgccagcgacccggtttccttctttatgaacatcaaaacggagacctacggcaccgcgaagatcgtcaagaccagtgaggacggcattgtgtccggcatttccttccgcatttccggcacggatattttgggaaatgaagtcaatgagactgttactaccggggataacggccaggtggaaaagaaattcctgcccggcacctatctggtgacggaaatcccggttgaccgctatgtgaccccttccgcacagtacatcaccattgagagcggccagacttcttccgtccatttcagcaatatcctgaagaaattccgcgtgcatgtggtaaagagcgacgcggacaccgggaccgcccagggcgacgccacccttgccggggcgacctatgggatttataacaatggcgagctggtagatacctataccaccgggccggaaggcagctttatgacccgttactatgtctgcggcgatagctggacggtacgggaaatcgagcccagcaccggttatcttctgaatgatacggtctatgaggtgggcgcttccccggcgctgtacgaggtggagctgaacactacggagaaccaggtcacggaaaccgtgatctatggcaatattcagcttgtcaagcatacggacgacccggacccggatgtgtccgaagatgaaaatacggaagaaccgaatgagggtgtggtcgagcgcccggaggccggcgcggtctttgaaatctacctgaaggcggcgggcagctatgaagcggcgaaggaaagcgagcgcgacctgctcaccacggacagcgacggctttgcttcctccaaaatgctcccttacggccattatacggtccaccagacagccggcgaggaaggcaaggcgttcattcctgattttacggttttcatcaatgagaatggcttcacctacagctatatcctgaataaccgcaccattaccgcaaggctcaaagtggagaaatgcgacgccgaaaccgggaacattattccgatgaccggcacgggcttccagatcaaggacctttccaccggggaatttgtcacccaggaaatcttctacccaaacccggagacccttgataccttctatgtttcggacgaaggctggctcatgctgccggaacctctgcataccggggattatgaactttacgaggtggcggctccttacggttatgtcatttccagtgagcccgtaccgttcaccattgacggcagcgaggcggttgtgaccgtcacacagcacaacatgccccagaagggccggctcaccattacaaagaccggcgaggtgttcgcttccgtccaggaaaacgacggcctgtatcagccggtgtatgaagtggccgggcttcccggtgcggtctatgatgtgatcgccgacgaggatatttataccggcgacgggaccctccgagtagcaaaggacacagttgtagagacccttaccaccggggaagatggaaccgccacaagcgtacttctgtacctgggccgctaccgtctggaagaacggcaggcgccggctggcatggtcgtaaatgctgtcccggaatatgcggagctgacctacgcgggcgagaccgtggaggtcacgcagaccgcagtagggttgtatgacgagcgccagaaagtggatgtcgccctgttcaaagccctggaaacagacgagcttttcgggcttggcatgaatgaggaatacaaggacatttcctttggtctgtatgcttccactgacttgacggcggcggatggcagcgtgatcccggcaggcgggcttctggaagtggtctccgtttccgcaaatgaggcgggcggctatgacgcttgctttgattccgaccttccgtttggcagctattatgtgcaggagcgcaccaccaacagcgcctatgtgctttccgataccaaatacccggtagtttttgaatatgcgggtcaggaggctgttcttgtctctatcctggtaaatgagggcgaggctgttcccaatgacctgctccgcggacgcattgacggtgtgaaatatggcgagagcacggaggttggcgaagatgtgaagctggccggcgcggtgatgggcctgtttaagcctgacaccgaagaatttaccgaagaaaacgcgctgcttaccgtaaccaccggcgaggacagcagctttgcctttgagaatatcccttacggccactggatcgtaaaggaaatctctgctcccgcgctctacacagtgagcccggaggaacaccatatttatatcggtgtggacggccaggcaatcgaaatccgtgtggacgataccctgatccgcggacgggtgcagctccataagaccgaggcggtggatgaaccttcttccgtggagaccgacaaggagaatactttcctgcgcttcctctccggcgcggtgtttgaactgtatgaggacaccaacggcaacaaggagctggatgccgaagatacgctggtcggcaccctgaaagagacagacggcggattccacatggcggagggacttctggctaagggctatttcgtaaaggaaaagaaagcgccggagggctaccagcctgacgaaaaggcttattactttgcgatcaccgaggacggccagaccgttgtaatcgaaaacggcgaggcaggccggggatttaccaatgaggcataccgcggcaacctgaaaatcaccaaagattccagtgacggacgcaaggacggatttgccattgaggtcaagagcgcagacggttcttactgtgagaccttcaccacaccgaaatccggcgtgatcgaggtcaaggggctgcgcgtcggcatttataccgtaaccgagctttccaatcgtgcaagcaaggattatatcattcctgacgcggccacggtggagatcaaggcggaccagaccgcaacggtccagttctttaatgagaaaccggaaaaaccggaaactcctgataatccgaaaacaccgtccaagccttccacaccgtctaatcctgataaggcagtaccgcagaccggtgatgacaatttcattttcctgtacggcggccttctggcgctggctctgatcggcggtgggatgtttactgccctctatttcaagaaggggaaatacagcagacagacccctaagacaaaggctgcgggcattgcggccctctccctctgcgcggcactggcgttaggcagcggcttcctgatggtccgtgacctctgccagtacagtgaaagcgccggggcttatgatgaccttgcaggactggtggagctgccggagcggaccgaaacaccggaggatatggagaccgggaccgcacccattgaaacggaacctgctgggtcagccccttccgtggttcttcctatggtggattttgaatctttgcgggaaagcgggccggacatcatcgggtggcttacccttcccgatacggtgatcaactacccggtaacgcaggcggatgacaacgagtattacctgcaccacctgtatgacggcacctacaataaggtgggatgcctgttcgcggattatgagaacaaggcggatttttctgaccggaacaccattatttacggacataacatgcgggacggctccatgttcgccgccctgaatgagtatgacgaacagagctactttgatacccataagcagatgtaccttgtgaccccggagggcggttatctctgtgaggttttcgcggcgtttgtggcaaagccttccgaatccggcagcgatacctctccctggcgtcttagctggaaggatgacggcgcttatacgacctggcttaccgctatggcggagcgttctgttgtggaaacggacgtcacggtgacaagcagcgataaggtgctgaccctttccacctgcacgcccggaggcgcgagccgcttcatcgtcatggcaaagctggtggaagtaaacaactgaacagactgaaaaccggtgcgggggcatgtgctcccgcaccagtcatttacaaggaggattttttctatggtgaataccattgtttcaatacccggctatgtgcatttgtaccgctcccttcttaggttttacgacatgccggaaaatgagatcagggaaatgctgtacctgctgaacacggccaacctggactgctacgagtattaccacccggagcgggaactggttgagagcggcctggtagctttctgccactggctggagacgatggactgccggccctaccgcacggaggtacagctttacaagtcgctgctgttcctacagcgcagcgtggaccgtgacctgatcgtgacttcccagcgggaggcattgcagacgcttaaatgtattatctccaatatcgaataccgcttttacaaggcttatgaaatggagatcgaggacaagcggaccgtgtacggggaatgtacctaccggctggtccccagggaggacgagccgagcgtgtgcctgatgcacgactggatttatctgccaagcgcgtaaactgtcacggattctatacaggattcgggacaaaaccattttcaaaggagggatgccttatcacgcagaaagaggtcaatgccgtttttgacggtcaggtggctctatgcagggaaatcctgcaaaagaaaacaaaggaatacacaggggacgatacggaccggctgggggctttcaaggctgccgctgctttacagcacacgacaccggagcgtgcccttgccgggatgctggcaaagcatatcgtttccctgtatgacatgtgctttgccgacggcatgagctttgacgccggcacatgggacgagaagatcacagacagtcttaactatctgtttttactgaaagcgattgtaaaggagggacagaccaatcaacagaattgaagtaaaggttttgaactgccaggcggtggcggaggccgagaaaaacatggtgtttgcggccaggcttacccagcgcgggcataagatcaatacaatggaggacctgacggccctttatgaaaagtcgttcagcaatgataccgtaacggcgatcagcaagctcccgcaccccacggtccagaaattcgcggttatcaccgttgccattgtaggcgcaagcaggcgtttccttgcgcagatcaccaggcaccagaacgaggtaaagtttatgagcgcgtccttacagtacagcaactatgcgggacaggcggattttgctgtaccctatgagattttgactgcgccgaaggcaattcaggaaatgtatctggaaagctgtaaatccgatatggattgttacgaagaactgtgcgcggcagggatcgggcacgacgcggcgggctatgccacgccccagggccttaggaatgtgctgattattagcgccacgccctaccagtggaaacatatcatcggccagcgggtatgccggcgcaatacggacgagacccggatcgtgctcctgaaaatctggcaggagcttttttcattgagcccggtactctttgctcccgatcttaccggccctttctgccagagagatcaatgtctggaggggaaaatgagctgcaaaagaaagatcgcgggcagcatgacgcccagcgggattttggcggcggattacccgctgcttatggaaggcggcgcccatgaagattaagctgatcgattttggcgtgccggaggatcagagaccctaccggccacatgggaacgatgccggcgcggatgtgtatatgccctatgactgcaccctacagcccggcgagattgcgaaaattcccctgggatttgggatcgaggtgccggatgggtttgccggatatgtgttcccccgcagcagcatggccgtcaaagggctggtctgcgagctgccgcctgtagattccggctaccgtggggaaatccatgcaatccttagcaatgtgagcagccggacgcagcacattcccaaaggttcaaggatcggccagctcgtcattacaccggtagtgatcgcggattttgtgacagagcttggggagcagcggggcaccggagcctttggcagcacagggaaatgataaaatgcagcaggaatttgagccgtcagacaaaagacggctcaatttaggacaaaacaaggattatcgccggtatagggaatggacattatcaggacattaccgggtacaataaaaagaaaagcggccaaccgctggccgctctaccgtttgctattgagttctttcataatgccgagaatgtattccattgattttgagtccaattttttggcctcagccatgaattcctgtagcgtctgcgggcaggcatttccttcatcaaagaattcctggggtgttacgccgagaaattcacaaaggtagaaaaaggactgcatagatggaagtgacttcctattctcaatgttattgatgtaattgttcgcctggcccagcgacaaagacatgtcacgggcagatacaccctttagcgcccttagctttgccagccgttccgggacaaaatcttcatacatcatagtcacctccttctgcataatagattgtaccttacaggaggcaaatattcggtagatgaaaaagggtatttgcgttgacttgctaaaataaacctactacaatatagcaaggcggtagttttaatctattatcggaggtgccagatgaaaaagaaaacatgctgtgtcacgggacacagggatttaccgcagaatcagatcaactatgtaaaggctgccctgctgcatgaaattgaaaaagcggttgcggatggctttacctgcttcatgagtggggtcgcggagggcgtggatcagtattttgtggaaatagttatggaaaaacagaaggacaatccagaattggaattgatcgctgtattaccgtatcagaaacggttagagaaccttaaagaaaaaggccatacttatgaaatgctggaggcttgccgtgatgtggttgtgatacgggaggaataccagcccagcgtctattcccaccgcaaccgctatatggtagaacactctgaccgggtgatcgcggtgtatgacgggcgagaacaaggcggaaccgtaaggacaatccgtttcgcacaccaaatgaaaaaagaactgcgggaaattcccgtgggagaaatctatctcccgaaaaagtaaaacaggatagaaaaacttggcacatcgctcacttgaacagtgggcgttttcttttgcccgaaaggaggcatttttatgtggagtatcataacacactttattgcatttattgccggtacagtggccggcgttgtgctgttctgtctgatgcaggcaggaaaaatggcggatgaaggttacgaaaatatggaacggagggataacgaatgaatactgaaattgcggaatatatcaaaaaccatatccgggagtatttaccgccggagtatcaggaggctcatatcactctggaagaagtgacaaaaggaaatgaccggaggcttaccggccttttgatccgaaacgacggtgaaatcactgtcccgacaatctatttggaaccctataccaagcagcttgcgcaggggcggccaatgaatgaaatcatgcgagaaatcgtacagatcagaactgagcaagataccaggattccctttgaagtatcggacttaatgaattacggacaagtgaagcctatgcttactatacgtctatgcgaccccgaacaaaaccgggagtatttgaaagataaaccgtttaccccgtgtggagagttggcggcggtctaccggattcaggtcatggagagcaaagagggtgttgcctctgctgttgttacagatcgtatgatggaattgtggggtgttactaaagagcagcttcatcaggacgcggttgcggcagaaacagcaagaagccctgtctgtttttacagtatggaagatatgatggacgaaatcatgttctcgtcaaaaccggaaaatctgtttgagcgcacagaaccgttggatgcagctactatgccaatgtatgttctgacaaataccagcaaagtaaacggttccgggattcttgcgcgggacggggttctggataaaatcggtgagctgcttggaaagaatttctatgttctcccttcgtctatacatgaggtgctgatcgtaccggataatgacgatatgcaggcaagggaactggaaagcatggttaaggaagtgaatgcgacccaggtcgctcctgctgaccttctttctgataaggtacagtattatgaccgggcggcaaaaactcttggccggaaacaggaaaaagggctcctggaacggctggcagaaaataaagcgcaggtaaaagaacatgcagaaaaaacaccaaaggcaaaaaaagcggcaaaacaggaaccgagtttataagggcagctatgcggctgccttttctatattcaaagaaatggaggatgacaagtgaaattagtaattgcagaaaagccctctgtcgctatggcgttggcggcggtattgggcgcaaatgagaaaaaggacggttatctggagggcagtggctacctggtgagctggtgcgtcggccaccttctggagctggcgcagcctgaagcctacggggaacagtatgccagatggcgctatggcgatctgccgatcctgccggacgaatggaaatatgaggtgccgaaggacaagaagaaacagcttgacctcctgtgtcggctgatgaaggacaaacgggtggattccgtggtgtgcgccactgacgccggacgcgagggtgagctgatcttccgtctggtctatgagtatgccgggtgcaggaaaccgatggaacgcctctggatttccagtatggaggacgcggcaatccggaacggatttgaacacctgcgccccggtaaggattatgaccgcctctatgacgccgcggtctgccgggccggtgcggactggctggttgggatcaatgcgaccaggctgttttctgtcttgtacggcgtcaccctgaatgtcgggcgcgtcatgtccccaacgctggcgcttttggtacagcgcgagacagagattcaggcatttaccagcaagcccttctatgtcccggtgatcacctgcggtggttttactgcttccggtgataagctggcggagaaacaggcggcagaggcggtccgcaggaaatgtgacgggcaggcggcttctgtcctttcaatggaaaagcagacaaagaccgtacagcctccccgcctctacgatctgacgaccttgcagcgggaatgtaaccgtatctacggctacaccgcccagcagacccttgattacctgcaatccctctatgagaaaaagctggcgacctatccccgcaccgacagccagtatttgaccgaggatatgcaggcaaccgccgcctccctgatcctgtggctgcgggacaacatgcctttcgggaaaggctgcctgggtgaaccggatattgaccgggtaacggacggcagcaaagttaccgaccaccacgccattatccccaccgtggagatcgcccggacggacctgtctgctctcccttccggggaacgggatgttttggcgctgatcgccatgaggctcctttgcgccaccggccagacgcaccgctttgaggcggtcacggcggtactggattgtgcaagtcattcctttacggcaaagggaaagactgtcttgcaggcgggttggaaggaaattgaacggctctaccgcatggggctgaaacaggcggaaccggaaaaggaggaccccgcagacgcggccttgccggagcttacccagggccagacctttgaaccggtggcagcaagcgtccgggaaggcaagacctccccgccaaagcactatacggaggattccctgttggcagctatggaaacggcaggcgcggcagacgcaccggaggatgcagagcgcaagggtttaggcaccccggctacccgtgcggctacactggaaaagctggtaacaaccggctttgtgcagagaaagaaaaaacagctcattcccacggaaaagggaaccaacctgattatggtcctgccggataatattaaatccccgctgcttaccgcggaatgggaatccagactaaaacaggtggagcgcggcgaaatcagtgcggaggctttcatggaagggatcgccgatatgaaccgggcgcttgtcaaagaacataccgcaccggaggaacggtttgccggcctgttcccttacgcaaaaggaacccggcgcgaggctgtcggcacctgtccccgctgcggcggcactgtgtatgagggcaaaaagggatttttctgtgaaaatcgggactgctcctttgccctctggaaagacaataaattctttacaggtaagaagaaaaccctgacaaaaaccgttgcggcggcccttctgaaagagggccgcgtttctatgtccgggctttacagtgaaaaaacaggccggacctatgacgcggttgtggtgctggatgatacgggcggcaagtatgtgaatttcaagctggaatttccggcgaggaaaggcgggcgcaaatgagcgccccaccggaaagggaactgacacgatccgagcgagcggcggtccgcaggctggtaacgaatctgtgcgccaactatgactgccaggataagctctgccttcccctggactgtccctgtttcatgctgaataaatggtggaccggcgcgttctgccgttatttccgggcggcggtgctgcctacggagccaaagctggaatctgccctgaccggtgaagatacttctctcaggcagaagatatgcccggtctgcggaaaggcttaccttccggtcacaagccaggcgtattgctccgattattgccggacctttgccagacggaaatccgagcgggaacggaaacggcgcaggcggcaaaacaggggatgatgtgtccgcaacttagctcaatcaagccagtgttttcaagggttttaaggccctgtttacggggcgcctatattagaatactcccggcctctgaaatggggttaagttgcggacaaagggcgctttttggcactctatttttatgacagtttggagggatgcctatagaaaaaataccgattgtgccagagatcatgcggatcgataccgggacgcaggccattgacatgcagcagatcgacaaccggcgctttctgttcaatccaaagaccggtgcgctggtcctgggaaaacagtttggaaaaacgaagggacttccaggcagccatgcggaagaactggcggctgctggtatcataaaggattttgatagctttgtacggggctggatcgggactggcaggaactatcccaaaggggtgatccactttgccccatgtgtagattccggaaacatttctctttttgaccgggcttttgacactctggaaatgttcagggaaaacggtgctctggctggaacagtggtacggggcttcgggagccggtgggaacagcccttatctgcgatccttacggatttacagaaagaggaacaaaagccctccctccggcagcagctaaagaaaacgccggagggcaaagctgtccggcacaggaaagaaaaccaacaacaacgataggaggcgattttttgagtatcaaccatattgaaacagaggaccttcgccgtatggagggaaaagacggcctgatcttgcagggctgcggcggcgagctgcaggaatggcttgacgggatcaatgaaatgttcatcgaggccggtattctgaaaaacggcgcgaagttccaggatatttccgcttttgagtatgacggccttacctgtctgctctatccctttgagggtgtggacctggagattggaaaacttgccatgtggcgtttacagacccatgatactttcggcggcacatggctctctgattttgttcccaaccgcctgggcgggtttatcggggaaccggcgccggagccggaaaagccggactgcgcgctgatcgggcaggatggcaatatttttaacctggtggggatcgctgcccgcactttgcgggagcatgggcttacagaccaggcaaaggaaatgaaggaccgggtatttgcttccggcagctatggcgaggcgctttgtatcatcggcgagtacgtcaatatcacagatacggagccggaacaaaggccctccctccggcagcagcttaaagaaacgaaaacagcggaaccgtctgcccgaccaaaaccggaaaaacagcaggaacgataacaggaggtgccgatggaaaaagaaaagacttacggcgtatgggcggtacgcagcgccgcttcaatctttggacgggcggaaagttggtgcaaggaggacgacaagccccttcaatttgcttcccaggaggcagccgaggcttacgcaaaggaatgtaacagccgcacgactgccaacgtccactattttgtaaaggaaaaggaaccggaaccgggtgctgtccgaaaggacggaacacagccggacagagctgcccgtgcccatgaggaacagacgccacgaaacgcggcggtggaaaaactgaatgagattcccggcaggcagcttccgaaagagccggaccctttggtggaaatccgttccgcggtacacagcaattatgccggcatggtcgccatgcttgcggcagacaaccgggtctatctgggccgtgaggaacgctatcactatcaggacgggcttacttcctattacgataacggcgacggttccctgtgctttattacagaccgggcggatatgtattatttcctctacggtgagggctgggcccattctcaggcggaaatgctggagcgcgggcttacagcggatcagtatgcggagtttgcccggctgcaaaacggtctcctccggcagtttgaagcgcagcgggaaatcctgttcgccgggcagcccttccagccgcccgaaagctatctacggaacgcggagctttacgaggaaggacagaccggcaattataatatgctggacggcaggatgaacaacgagcccccggtaaaaccggacctgacagacggccagacccacgaggaaatccgggagcttgccccggagaccttgccgaaagaaaagccctctgtcctggaccgcctgaaatccgagcgcccggagtatgaggcgaggcagatcacaccgcctgtcccggaaagggggctttgagtatggggacaaaatttgaaggcgttgacgtgctggactttctggggcaggtcgtagaactgcatacgcagcattataaagatgattttgatatggataaagagctgattctaaaactggccttattgggagaaccggaggaccggcgccttctctggatgtcacggccctgcggcacctattgtttgagcgagcgggaggtgtatctacaggaaagcaatgaaaataaagtatggatgttctaccatgagcagacgaatgacccgattttagcttatgcccttacattggatggtttgcaggatggaaaagtgaccggcaccatctaccccctggattacccttcccatgtggagcgggtgaaattgctgtcctgtcccattgaccgggtaacggtgacattcaaggacggcgtacagtttactttgccgtaccagtcacggagacggcagatcaatgagcttatgccggagcacggcacgccaaaatccatgcagtacgcgccggaaagcgagcgggagctggcggtgatcctgcgccgggaacggctgaaacgggattaccatgcaaagccgggcaatgttcaggaatacatggaaaaattaaaaaaggcgtccatgcgcggcaggctcaaagaagcgcgaacagccaccgcagcttccccgaagccgccctccccgaacaaggggctggaacgatgaagggcggacgggataagcggtctgtccgtgtggagtttgttctgaccgaggcggagtctgctttgataaaagagcgcatggcagagctggggatcaccaacctttccgcttatcttcgcaaaatggcggtggacggttacatcattcacctggatatgggcgacattcaggaaatgatacgcctccttcgtatctgctccaacaacttaaaccagtacacccggcgtgccaatgaaaccggcagcgtttatgctgcggatgtggaagatctgcgtacccggctggatgacctgtggaatagcatggataagctgctccggggatttgcaaacatttcgtaaacggtgaaaatagccgttgctttccggaaaccggcacggtagaattttggtagagggatatgatattttcccgcggaaggaggcttgacttatgcgtctgatattcaaactgttggcgtttccctttgtcctggttacggggcttctttatctgatatgcaagttcctggtgatcgtgtccggcgcggtgctggggattttatcaggcattgtatttctggcgtcgctggtgctgttctttactgccggagtgtgggccgggcttgcatggctggtgatcgcgtttctgataagtccctacggtctgccaatggcggcggcctggctggtcgggatgattggcggagcaaaccacgcgctcaaggattttgtatttggataaacttacgggcggggcattttcagtgtcccgccctctttttcactattcagggctgtctcacaaggcagcattttctatttggagggatcaaatgaaagacacaacacagctatatatttatccggcttcctatgcgcgtgagcatggagaactggaacaataccgtgcttcctataaggcaaatatcgcctgtaaggaggcaatcgaacaggccattgccgatcactaccgggataaccgcctcggcacggaggcagtacatcaggttttggaacagttcggctatgaccggatgttttatgtgcttgcgggcacggtccgggaaaaagattgggatgggcgtatttcccgcgataataaagcctgggcgaaaaccattccggtctacgagaacccggacggcttcggccaagatcggaatgtttactttgtggtggaccacagccaccccggacttgtcgatctctttcttacgcaggcccggctcgattatacaaaggaacatgggaaaaaagtctcgatccgcgaaagcataaaacagaatacagagcagacggcagccgtacatgcaccaacaaaacggaaagagccggaacgttaatacattttcaaattcgcacaaaacagatattttccctattgtttcgtgcagttcaaaaaacgattatttctgaatccgttcaaaaccgttgtattttctcttgctttgcgttataataaaaacaaaaaggaggctatgcaatggaactatacaaagaacttgccgctttgcgctgttttacacacgatgatatggtgcagctcgccggatcagaaagctccgctgtatggcagataaagagttatctgcaaaaaggatatatcgagcgtgtgcgccgcaatctatatgcggtcatcagcatggaaaccggacaggcgatcccgaaccgctaccagatagcttcccgcgtgacagacgatgcctgtgtgtcccaccacagcgcctttgaatactacggatatgcgaaccaagttttttatgatgtgtacttcaccactgaaaagcgcgtccgcccattctcttatgacggcgtaaattactgcccgatggcctgccggggaaatgcagacatcataaaaatagacaccggcatccgcgtgacttctttagagcggaccgtgatagacagtatagcggattttgaaaagatcggaggcctggaagaattgctgcgctgccttctcctgattccttcgcttgattgtaacaaactgcttgacgcgctggaactgtatggccgggcgcagctatatcaaaaggccggatatattcttgaagtatggaaagaggaactgtctttaccggaaccgttttttgcggaatgtgaaaaacggtcttctgccagtaaaacctatctttttgaaaagcagggcgattttgtccttcataacagatggaaactatttgctccaaaggatttgaaaacgatcataagtaagggggtaactgattatgatgcgctttgaccgtattacgcttggcagacaggccaaagaactcggctttgtccgtgacacctttgagaaggtctgccgcctcgcggacgttctttcttttatggaaagcgatgggctgcttgcggacagccttgccctgaaaggcggcacggcaatcaatttgacgatttttgatctgccccgcctgtcggttgatatagacctcgatttctcaaaggatgtatcaagggaacccatgctggcggagcgggagcagatcaatgaacacatacaaaaatacatggcggcttccggctatacgctgagtttgaaatcaaagcaataccacgcgctggattccttcgtgtacgagtatgtgaatgccggaggaatgaaagacaacctgaaaatagagatcaactatatgctccgctgtcatacgctgcctgtttcccgcagaccggtttatttgccgtggaacgatcaggagcttacagtattaagcgttgatcctctggaaatcttctccgcaaagacggttgccctcttaaaccgggcggccccgcgggatttatatgatatgttcaatatgcagaagtatggattgtttgacgagacgcaggaaccgcttttcagaaagtgtattatgttctacgcggcgattgcttcggaaaccgtgccggaacactttgaccttgatggtattggcaacatatccgcacggaaaatcaggacggaccttacaccggtgctgcgccgtggagaacgctttgacctggcctccgcgcagaaacaggtaaaggattatttagccgcgattctaaaaccggaagatacggagctgtccttctggcaggcttttgcagagggaaactatcagccgggccttttgtttgacgatgctgatattctcccgcgtattgaacatcacccgatggcgctatggaaatgcggcgggcgggtgccaaagcaaaaagatacaccggcgttataacgaatacatactaagggctgtccttccgggcagctctttcattttgacaagggggtgatcctgatagcgaccacaagactaatgccgctgcatgtgggaaaaggccgggatgtgtctacggccattgtggacatcattgactatgtggagaatccgcagaaaacggattttggaaaatttatttatggctatgcgtgtgatacccggattgcggatgcggagttccttctttccaagcggcagtatttgaacctgaccgggcgggaccggggcgcagatgatgtgatcgcctaccacctccggcaagccttcaagcccggcgaagtcacgccggaagaagcgaaccagatcgggcgggagctcgcactgaaactgacaaagggcaatcatgcctttgtggtgtgtacccatgtggataagcaccatgttcataatcacattatcatcaattccaccgcccttgactgcacccggaaattccgcaacttctggggctctacctgggcgatccggcgcatgaatgacaagctgtgtctggagcacggtctgtctatcgtggaaaatccaaaacccagcagggaccactatggcacatggctgggaaatacgaaacagccctccttccaggagcagctacgccgggcaatcgacgcggccctggaagaaaggccgaaaggctttgaggaatttctgaaaaagctggaggctgccggaatcgaagtcaaccgggaacgcaagaacctccggctccgggtgccggggcagaaaaactatacccggtgcaatacgctgaaaggcgactataccgagcaggcgatacaggaacggatcgagggcacccgcacggcaaaaccccgccgtactttttcgcaaaagcccgttccaaaggttgggctgctggtggatattgaggcagcggtccgggccggcaagggaccgggctatgaacgctgggcgaaggtatttaacttaaaacagctctcccaggcggtgatctacctgaaagagcatggagatatgagctatgaagatttgcaggaaaaagctgctgcggctaccatcagctttaatgcactgtcggcaaagatcaaggaactggaatcgcagatgaccgccaatggagaattgcagaaacagatcgtgaactatgccaagacgcgggcggtctatgtggaataccgcaaggctggttatagtaaaaagttccgggcggagcatgaggcggatattctattacaccaggcggcgaagaaatattttgacagcataggaatcacgaaactgccctccgtcaaatcgctccgagaggaatacgccggtctgctggaacagaaacggaaagcctatgccgcctataagcaggcccggtctgatatgaaggagcttcacaatatcaaggccaatgtggactatctgctggacattcctgcgtctcaggagcagcagaaagacaagcaaaaatcccgacaatagttttatgttgctttgggttttcagcgttccgaaggaacgcgcagccgtcaccgcaggtggcgatctcaggggtttggggatatgtcaccaacaagcattttagagggtttcacggcaacgggaaatcctctaaaatacgcaatcttacggaagattgcattgcttgcgaacttgtaaaatagaaacagattcttgacaaaactctctatacatcatataatataacagtgatatataacagtgttatggaggtgaatagaatcaaagaaagtcagactactttagaacgtatccaccgggcagcgaaagcagaatttttagaaaaaggatacaaagacgcttccctacgaaatattgtgaaatccgtgggaatgaccaccggtgctttttacggttactataaaagcaaagaagaactctttgaagccattgttagtgagcattacgaatatattctcaaccgttttataaaagcgcagcaggagtttgccgagcttccagctgtacagcagccggaagtcatgagtgatatttcggggctttgcatggatgatattcttcattatgcgtatgaacatttagaggaatgtaaactgctcctctgctgctcggaaggaacaaaatttgcagagtttattgatgaaatggtagaaattgaaacaaatggaacccatgcctatcaagatgttttaaggagacttggaagatcctctcctcatatcgatccctcgctggagcatattctaatcaccggaatgtttcatactttttttgaattgatcatccacgaaatgccgctcaaagatgccgaaaactacgtcagagaaatgcgcgccttttatacggcgggatggatgaaaattatggggcagtaatgccttataatttttgcctgtaagttagcattaactaacctaaattcggatattgtaagaacatagacgtgttctctttatcataaacacaaagaaaaggaggaatttttttgaaaaaacaatccaatttatcacggctgctggaaattgcaggcagccataagtacctgacctatgcttcctgggtgctttctgccatcagtgccctcattgctctggtgccattctattacatctggaaaatgatcaaggaagtactggaggtggcaccagattttggtcaggcacagaacctgaccggcaatggctggatggcagtattgtttgcagtcctggcggtgcttgtttacatagccgggcttatgtgttcccatttaggggcatttcgtattgccacaaacctgcgtatccagaccatggagcatattgttaagcttcctcttggatttgccgaaagatttggcagcggaaaactgcgtaaaatcgtcaacgaatccagcgcagccaccgaaacctatctcgcccatcagcttcccgacagagccaatgccattgcaaccccctgcggtcttttggtgctgttgttcgtgtttgactggagactggggctgttgagccttgttccggttgtgctgggctttctgattatgatggcaatgaccggaaagcagatgcaggaaaagatgaaagaataccagaatgcgctggatgatatgtccaatgaagcggtagagtatgtccgcggtattccggtggtaaaaacctttggtcagacgatcttttcctttaagaagtttaaagattccattgaccgctataaagtatgggtgatcgcctataccaagcagcttcggacaccgatgatgttctatacagctgcaatcaacggagtttttgccacactgatcgccggaggactgttgctgacacaagacggtgtaacttccggtttcttactggatctcattttctatatcattattacgccggttatttctgttacactgacacgcatcatgttccaaagtgaaaatgccatgatcgtagatgacgctttacagagaattgacagcgttttgcatttgaagcctctggaggaaaccaaacacccaatgcacccgcaaaatgcttccgtggaactgaaatcggttcatttcagctatgatggagaaaaagaagtattaaaagatatttcattgaccattcctgaaggccgaaccgtagcttttgtcggcccgtccggcggtggtaaaacaacccttgccaacctgatttcccgattctttgatccccagagcgggatggtaaaaatcggtggtgtcaatgtgaaagacattccgaaagagaaactcatgaatacggtgtctttcgtatttcagaacagccgtctgatcaaggcgtctattctggaaaatgtgcgtatggggaaaccggaagctacccgtgaggaagttctggctgcccttcatcacgcacaatgcgatgatattctggaaaaactcccacagggagcggatacggtcatcggtacaaaaggtgtctatctttccggcggcgagcagcagcggattgccattgcccgtgtgatgctgaaaaatgcaccgatcatcattctggatgaagccactgcctttgctgacccggataacgaaagccgtgtacaggctgctttctcaaaactttccgagggaaagacagtgattatgattgcccacaggctttctaccgtaacaaatgtggatcagatttttgtcattcaggacggacaggttgccgagtgcgggaacagtcgtgaattgcttgcaaaagacggcattttcagccgtatgtggaaaaattaccagacttccgtgcaatggaaggtaacaaaggaggtgcagtgatatgatcaaaaaactgcagaaaaaatatgccctgtctgaacagggagcaaaagacctgatcaaaggctgcctggcctgtgtccttcagaatctgtcttttatgttcccggtaggacttttatattacctggtcagcgatctgatgaacgggggtgttcccggtgggaaaattccattttatgtggcaggctgcgtgatgtgtatcggcttgattctgctgaccactttctttcaatacaatgcgacctattttgccacttacaaagaaagcggtatccgccgcattaccctggcagagcatctgcgcaaaatacctctttcttttttcggaaaaaaggatttagccgatcttaccagtaccattatggcggactgtaccttcctggaacagagtttttcacattttatccctgagcttgcgggttcgatcatttctacggttctgatttctatcggtctgctctttacggactggagaatggcgctggctgccttatgggttctgccggttgcctttgcgattgtgggattttccgcaaagattcaggaaaatctgaatcagaaagcgatggatgtgaagatggcctgcgcagacgggatacaggagtgtattgaaacagttcgtgatctgaaagcgaacaatgcggagcaggcatatttaaaagggctggaaaagaagatccgtgctgtggagcatcgttccatcctcaatgaatttggtcttgctgcttttgtggtttccgcgtcactggtgctgaagcttggtattgcaacggttgtgctggtgggagctgttctgctcatgcaagggagcctctccgtgcttacattctttatgttccttctggtagtatcccgtttgtatgaccctctgcagggcgcactccagaatcttgcggcagtcatcagtacacgaaccaacattgcccgtatgaatgagattctcgatcatccgatccaacaaggcagtgacaggctttccaatcaggggtatgatattgtctttgaccatgttgggtttgcctacaataccggagaaaccgtattgaaagatgtttcctttacggcaaaacagggagaggttacggctttggtcggcccatctggcggcggaaaaacaaccgtatcccggctggctgcaaggttctgggatattaacagaggaaagattaccgtgggaggcatggatgtatcccgaattgacccggaaacactgctttctctgtattccatcgtattccaggatgttacactgtttgacaatacaattctggaaaatatccgaatcggaaacaaagacgccacagatgaacaggtcattgctgctgcgaaacttgccaatgtggatgaatttgcggaaaaactgccggatggatggcataccaatatcggggaaaacggctgtgaactgtccggaggagagcgtcagcggatttccattgcaagggcttttctgaaagattctccgatcatccttctggatgaagccactgcttctcttgatgtggagaatgaaacactgatccagactgccctttcccgcctgatcgcggataagacggtactggtgattgcccatcggatgcgtacagtggccggcgcagataagatcgtagtcctttctgatggcaccgtggcagaagaaggatcaccaaaggatctggcagaaaagaatggcgtatatgcccatatggtaaaactgcagacagaaagtcagaattggaaacttgggtaaagaaggaaaatgaggactggttatgcaaaaattaggcgttttggaggataccttgtttatccctatgctgggcagaatctatgccagtgagcattgcccgcaaattttatatgataaaaaagcattggaattgaagaacaagctgccgttagacttgattgaacagaatgtgcagaatcagtataccctcttggcctctgcttcccggtttgttaatatggatcgggttattcgggcttttctggaacgcagaccggacggtgcgattgtccagctgggctgtggtctggagacaacctatcaccgatgtgataacggaaagacacactggtatgccgtggatctgcctcatgtgatcgaataccggcggggacttcttcccgaaccagagagggaattctatatttccggggatgcctttgcaaaggattggatcaaaaaagttcgcaatgatgtacttgatgctcctattctcgttactgcaggcggattatttcattattttgaggaacataaggtcattgcccttctgcgtatgattgggcaatttggaaatatggaagttgtttttgatacggtgaacaaaagaggcatgaccatgatgaagaaaaaatatatgaaacaggtcggccatgccgatgcacagatgttcttttatgtggattcagcggaagaactggcagcaaagatcgggggtaatgtgaaggtgattgcggaggaaccatactatcgttacatccctaaaaatggcttaaagctatccacaaaggtcagtatggcggtttctgatcggttctgcatggtgaagatgatacagttgaaattatagatacttttgcgcgaaaaagaaaagaggtgaaatcttgttatgacatataataattgttacctcaatcaactctacagtgatttgcttttcaatgaattagagcgaggatgtattactcaaataaaaattaagcacggggtgattttttctaattggtaatgaaactaccaaaaaaactattatatatttagtttatatcaactgatagggaggtggaaatgagcatgagtgaactccacaaaccagaatggtatggggaatatgctgtaattaaaaataagtataatgattatgttcaagtggagtataaatgcaatggaacaggaagcctatatgactatgaccttttccctggtattgacttgatttttatggattttaattgttcagatattttccatgagcctattcctaataagaatatcattgaaatccggcattaccaaaaaggacgtgttgagtttgagttaagaaataacaaagtgttccacatgaaagaaggagaattttgcattaatgctcttgcaaatattcctgcggcgtattccttcccctttggatatagtgttggattgagttgtgtgattgacaaagattctattgatgcgaaaacaaaacaaattttttcttactataatattgatatcttaaatcttggacaagaattggaagtagaaaaaaagtggtttttatgccggacaccacagcgattgttacatatctttgatgaattatacactgccaaaggcgtggaaggaaaagattacttccgtataaaactattggaactcttttaccatatcaaacaactgcgaattgaagatcaatatgaagcaacgtattattccaaagagcaaattgaaatcattaagcgtgtccgacatcagcttatagaaaacctggacaaaaaaatgtccatagaagaactcctgcaaagagagccaatgagcaaggttacatttcaagctattttcaaacagatttatggcgacacgccctatgcgcatatcaagaattacaaaatgaatcttgcggctgtttatttacaggaaacagatcaatccatcacccaaatagctggagaacttggatattcaaatattagtaagtttgcgagagcttttcaagaagtgtttagaatgcttccaaaggattatcgtaaagtaaaaaaattaaattaacttttgggctgttttgggaaactgccttttcatttggagtagttagcggatgcgaactactgtataatagtgtcgtggttagttatggctaatcacgacgctattatatttaaggaggattctggaatggaacaaacggtaaagaaaaaaataggcgttcgcgatattatgacgattgccgcaatgatggtcatcaatttcgcaattgcaatggtgattggtatggttacattgcctttcccagcagtatatttatacggctctgccggtattgatgcctttattggagcaacattttatttggttgcggcaaatcgtatcaacaaacacggattgttgtttgcttgggctgcggtttatggactaatccaaggtgttatgggttatatgttcttggttccctatttcttgattgtagccctcattgccgagttatgcatggttggcaagaatacataccgaagtgcagttcgcaaccgaattggctggatggtcaactcaatcggaaattttgtaggctgtgccgtaccgctgtggtggtcttgggacagctatcaggaaatggcagcaagcagcggttttgatgcaaataccttgaatatgcagctctctatggtgacttctccggcactgatgcttctgggtgttgtcattactgcggctcttgcaattcttggtacattgttcggccagcggttgctcagaaagcatttccaaaaagcaggcattgtaggatgatggccgaagaaaaaaaacaaaggcggattgaccagatcgacgggcgcacagttctttttctgacgctgtgcgcctgcatcgtgacctttctcgcaaccagtttttgggaacatggaatttttaccttttggatttttttgatcctctgctggtttggcttgtataagcaggctttgggatgttttgcggtctatttggcggcgattgtatggctgatgatcgaaacaaagtatcaggtcagcattccctctccgctgttactcagtatgatttacaaacttttacttcccgccatgccagcctatcttctggctaaaatcccgtccgggaaattgacagccagcctgcggaaaatgccgattcctacccgtatcatgcttgtattgatcgtaatgcttcgttttgctccgactgtgctgcatgaatttggagaagtcaaagaagccatgaaaattcgtggtttcttaaaatcggttggcagtgttttgaaacacccaatggacacattggaatacgccattgtcccgatggtatttcgctccttaaagatcgcggacgagttagccgcttctgccatagtcaggggaattgaaagcccctacaagaaagaaagttactatgtcagccggattgctgcgctggattgctttttgattgttgtcagcgtgggagccactgtgtgctgctgtcttttataggaggaatggaatgggaaaagaaataatgatccgtgacctcaccttttcctatggcgggaacggaaatcaactggaacatatatcgttagacattgctgccggagaagtcattgttatgaccggcccatcaggaagtggaaaaagctctttgacaagagtgattaacggactgattccctatttttacgagggggaattaagcggggatgtttttgtggacgggaaaccgctgaaagaaattccgtcctgggagcgcggcaaaatcgtagggaatgtattccaagaccccaggagccagttttttgccaatgaggttgctggtgaggttgctttcggctgtgaaaactacggttattcccatgaggaaattcggaaccatgttcaccgggcggcggcggacattaagattcaggacattctggattatagtctgcacagtctgtcttatggaatgcgccagaaggttgcaatagcatcggcagaggcgattgacccggaaatctatgtcatggatgaaccgtccgccaatctggatattgcatctacttatcgctttgcggacattatctgcgatttgaaacaacagggaaaaaccattatcatagcggaacaccggctttattatctgatggatctggcagaccgcttcctgtgtgtgcagaaaggaaaaattgtgcgggaatttaccgcacagcagatgaaagctctgactaatcaggaaattcagacgctggggctccgcactcctgatctgcatcagattgagcagacagaaatccagtctgcggcaaccaaagaagttgtcctggaagtgaaaaaactgaaccactcttttggtaaaacgattgtagctgaggatattgactttcaatgccatcagggagaagtgattgccctgattggtcccaacgggacgggcaaaagcaccatagggcgaatcttggcagggcttttgaaagaaaaatccggcgaagtcgttttattcggaaagcattgcagacccaaaagccgcttaggaaaggtctggtacattccccaggatttagacagtcagctattcggtgaggatttgctggacgaactgactaccggcgctgaggtcagtccggaacggaaacaagcagcggaagaaatcctggaggctctggaactgacgccgtttatcaaacagcatccctctacgctgtcaggagggcaaaagcagcggctggctcttggcgtagccctaatgcacgaagcgcctattatcatacttgatgaacctacaagtgggctggacggtacaaatatgcgaaatgtcagccggatgatccgcaaactggcgaagatggggcgcaccattatcgtcattacccatgacgcggagtgtgcgcttgcctgctgtgagcgggcaatacgccttgaaaacggttgcattaccgatgattttcaaatcagaggagcaaagctccttttagaaaaaattgggtataaccaaaaggagggttagaaatggcacagcaaaataaacagcagccgaaggctaaaaccgggctggcacgctgcctggaattggcttcaggtcataaaggacttgtgtttctatcaggttttttggctgcactggctgcaatttgttcttttgtaccttatttatcaatttattacatcattcgggaaatcctgtttgtttatccggatatgtcgctcttgaatgtttctacaatctcaacctggggctggcttgccctggctggaattttggggaacatcgtattttacttttttgccctattgtgttcccacattgcagcgtttggaacgctttatgaattgaaggtggcctttgccgatcacatcatgcaaattccacttgggtatcatttgaccttgggcagcggcaagctgagaaaaatcatggacgaaaacattgaaagcgttgagaaatttattgctcaccagctcccagattttgtagcctctttggttgcgccgcttgttctggttattattcttcttgggattgactggcggtatggtgtggtttgtctggtcggtattattctggctttcatcgttcagtttgcgggcttcaacggcgaagcaaaggaaaaaatgcaccgctttcagactgcccaagaaaacatgaacagcgcctctgtggaatatgtgcgcggtatgccggagatcaaagcatttaatcagaccgcagattcttttaagaggctgagcaaatccattacggactatacatctttcgtgctggagtacgcattgggttggcaaaactgtatgcctgcatttaccacaatcatcaacaatatttatctgtttttaatcccggtgggtgttctgatcgggatgcacactacggatttcagagagtattcgttgacattcattttctacctgattattgtccatgcgatttctggcatcctgaataagattatgtatatctcggagtcctttacgcagattgatggcagtgtagagcgcatggatgaaatcttgcgtatcccggtcttgccggaaaagaatacaacggctgaaatccaaaactatgatattgcttttcaggatgtcagtttttcttatgaaactgattcccaggtcaaagccttggctcatgtctctttccttgcgcctcagggcaaggtaacagccgttgttggtccttccggtggcggtaagagtaccatagccaacctgatctcccgattttatgatgtgacggatggaagtattcaaatcggcggtgttgacattcggaatattccgctggatgcgctgatggataaggtcagctttgtgtttcaggatacattcctctttaagcagagcatcctggacaacatccgcatgggaaatccagatgctacggaggaacaggtgattgcggcggcaaaggcggcaagatgccacgaatttattgagcagcttccaaacggttatcagactgtaattggaagcaccggtgttcatctctcaggtggtgaacgccagcgtattgccattgcaagagctatcgtaaaggatgccccaatcattgtgctggacgaagcaactgcattcagcgacccggaaaatgagtacctgattcaaaaagcctttgaaaagctaattcagaataaaacggttgtaatgattgcccatcgtctgtctacgattcgtaacgctgaccagattcttgttatggaaaaaggatgcctgattgaatccggcactcatgacgagttgctgaagaagggcggaaaatacgcgcagatgtggagcagctatacggagtcaatcaactggaaaattagcacaggaaaggtggtgtgatctatgagtaagctgaaagaaaagttaatgctgtcggagaaaggctactccgacctgaaaaaagcgattacagcctgcacaataaccaatattgcgcttctacttcctgcaacgatagcctgcctgctcttttgggagctactgaagccgtttaccggagaaacaatttcgtgggtcgcgctgtggaagttattgggattgggagtggtagcggccatcctggtctttctggccgccaaaaacgattaccgcaaaacctatattgcctcctataaggaggccagcacgaccagacttcggattgcagagcatcttcgcaagctccccatgagcttctttaacacgaaagatttatctgatattaccacaaatatgatggctgattgtagcagcatggaatccatgctcagcagtacaattccgccgttgattgcgaatattatttccgtcaccctgacctgtatttgtctggcgttttttgactggagaatggctcttgcgattttctgcacgatgccgattacattcctcatcatctggtgcggacgcaagctgcaactccgcctgtttgacaaacaggtagatgtgaaattagaggcgtccagccagattcaagaatacctggaaggtatcaagatcatcaaatcctgcggccttggcggttcccgtttctccacgctggataaagcactccaagccatgagaaaaatcgctattaaggtggaactggcctccggcattctggttcagggagccagcctggtcctgcaagcggggcttggcatcaccattttcattggaacggtgctgataaccggcggcgagattgaactgcttcctctattggttctgctcatgttctccacgcaaatttacggtccgatccttgccatcctttcgcagttgacttctctgttccacttgggaactgtcaccaaccgtatgcgtactctgctgaccactcccgctatggagggcgaggataaggatgtatccaagtatgacattgaactgaaaaatgtcactttcggatataaccgtgatgatgttatcaaggatgtgtctttctctattcctgctggcagtataacagctctggtaggaccctccggtagtggaaagagcacgatttccaaactgattgcccgcttttgggatgtaagaaaaggtcagattaccattggcggtatggatgtcagaaccattgagccggaacaccttatgcgctgtatgtcctttgtatttcaggatgtaaccctgttcaacgatactgtttttaataatatccgcgtaggtaacatgaatgctactgaggagcaggttatgacagcggcaaaggcggcatactgtgacgaatttatccagcgattgccggacggttatcagactgtccttggggaaaacggcagcaccctttccggcggtgagcgtcagcggatttccattgcccgcgctctgctgaaagatgcccctattattcttctggatgaggcaaccgcatcccttgacccagaaaacgaggttttaatccagagggccattgcaaaactggtggagggcaagacggttattatgattgcacaccggcttcgtaccgttgcggatgccgatcaaattctcgttcttgataacggtagactggtggaacatggtacacatgatgaattgatgaaaaagaacggattgtaccataaactgttccatatccaacaggagagtcttggttgggctgtgtaaattgttttagaaaggagatgttccatgaaacttcatgcgtctggggaggactatctggaaaccatccttgttctccaaaagaaattaggtatggtgcgctccgtagatgtagcccggcacatgaaggtgtcaaagcccagcgtgtgccatgcggtggctaacttgcgagacggcggctttctcacgatggatgaagattactttctctacttaaccgatgtaggtcgcaaggttgctgaaaaaatttatgaacgtcattgcttctttacggaacagcttattgcagctggtgttgatcctgaaattgcagaagtcgatgcctgccggatggaacatgttatcagtagcgaaagttttgctcgactaaaagaaacagcaatacaagaaggaaattttagaaacaaaggcggtgatgacatgggaagttagttgtgtttgatatatcggaatctggtaaagaaattggagaaaaattgtttatccttttaagtacaaagcaacagcaggaattgaaacaatttattatggatattgagtgtggaaaaataagactagcagatattttatcttgttcttttggttcccatgttatttgctgcatgaataaaaatgctggcaaagcaaagtttgaaatcgaaaaagatgatctgtttttctctttggaacagcgtcttgttatgattcaaaataaagtgattgctcttactgctaaggaatttgacattctggctctactgatccgtcatcccaaacgggtatttacctatgaaatgataacggaactggtatgggaagaagaatatgcttccttttcccgaaaggcagtgaataaccatgtaagcaatctcaggcaaaagctcaaggtttcgccggatgtaccagactatattaaaagtgtatatggagttgggtataaatttgatttagattaaccgaatatacattatatacaaaaataaatgaataaaattgtatttatgatagattttgccggaacaaggacagttctggaagatttcaagaaaagaacgagcataaaagtttgtataattccttcaaatagatagaaggaggcggataattggcaagcctgtctatccctccttgatttggagggagggcatggttatgctaccgaggtcaacatgccggcctcgatgctgccggccaaatctatcattatgccccgtagtctggttttggattgcggggtttttccattcgacaaaatattatattttccaacatttccctttcaatcaattattagggttgtatgagtgcgcgcctgtcatcggacagacgcgcacttttgcgtttatagaaaaattttttgtctttctgttctctgtggggtgtcgctccccgccctctgatttcggttttagcttttcacacgcaaacaaatcgaaattggaggaaatttatatgaaacaaatcaatttaaaggaatattacccattttacacaacagacacaatcgtagaagtaccggatgaagtcgctgatattttaagagcttataaattacgcgatgaagcatatcggatttatacatatcgacacaaagcatatttttctttggattttggagatggaattgaatatgaagcccttgtagatcaaaaatcaccagcagatatttatgaacagcatagggtgactgaaatgatctataagggacttgctactctatcagaaaaacaacgtcagaggatctatgcacgttattttctcggcatgagccaaacggaaattgccagagtggaaaactgcagtaaaatctcagttcatcagagcattaacagaggtttaaaacagcttcaagaatattttttaaaaaataatttataagcccactaacttttcccttaaaaatgtactgtattatgaagggaccttttggcaggacaagccattgtggttggatcggacagaaccgttccgatatatttccaatatggatcgctttgattgccttctctccctcatggttctttgacaagtgaatatacgttgctatgggtacatcattctgcgtaccgagcggcatatagggcggcgccatgacagacagccaaaggaggtgatgaacccggttgtccgagcgatccacgcaacctattaacccggctgtggcaggttcgggcgcgacgacggcgcagatgacaatggtacttcttcacggcctcctaaagacttggggggagttcctgcggcgtgcgcttgctctggcaaagcggcgacgactgcggggctatgatgcggtcaagctgtccgcagcccatagcaacccctgttctgtgtcaacagaacctgccggggatgcgtggcaaatacggcatataaaatcgaaatcagatactatgaagccgggcttagattacaagtccaggtccggctttatccatgtgattttgatagagaatcaatttacggaaaggagctggaaaaatggaacaaaagacttcttatgatgataacctggtggatattcgcagtgtatccgtcaacaaggaacttccgcgtgaagaacgaattgccgagttcgtcagacagatcaagaacccctgtcatttcaggtgtggaaagtttattgtgcgtgctacttattgtacggacggagctacattagaagaatgtctgcatggtatcttacgataaaaatttacattttaggggctgttttttcccgcgtggagcgttataataagaatcggaaaaggaattgaataacaataaggcatattgcactccttgaattgcggggatttttccgtaatgaaaggagtgtttttgtatgcagatttataaagctgcgaagtatatccgattatcttatacggatgataagtcaaacgaaagtgacagtgttggaaaccaaagaaagctgattgaggaatttgccaaccaccacccggagatcgaacttgtttcggaacgagtggacgacggttatagcggtgtgatttttgatcgcccggctttcaaagaaatgatggatgacattatggagggaaagatcaactgtgtgattgtaaaggatctttccagacttggacgtgagtatattgaaaccggccgttatatgagacgtgtttttccggcttatggtgtacgttttattgctatcaacgataatatcgacacaatcaatgagtccgccggggatgaccttacggtctccgtaaaaaacattatgaacgaggcttacgcacgcgatatttctttgaaaacccgcagttctcttgaaacaaaacgtaaaaatggagattttgtcggtgcttttaccgtgtacggctatcgtaaatccgaagaaaatcataatctccttgtggtagatgaatatgccgctcaggtggtacgaagtattttcaggatgcgcctggaaggtttcagtccttatgcgattgcaaatgagctgaaccgtttaggaacactttctcctcttgcctataagaaaatgaatggtctgccttgtgcaagaaacggatataccgatcgaaaagattgtcggtggtcctctactacgattgtccgtattttgcaggacgaaacttataccggcactctggttcagggaaaacaaggctcacagcactttaaactgaaggaaattgaaaaccgtcctcagtccgaatggattcgtgtggaacacgctcacgaagcgattattgagccccacgattttgacctggtgcagaagatccggcaactggatacccgtacttctcccggtaaaaataaagtctatttattttccggcatattgatctgtggctgctgtggcgcccgtatgatacgaaagacaaaccgctataaagacaaagagtaccactactactattgccctaccgggaagaagagtggctgtacaaaccctgttatggtaaaggaaagcgacctgatggaatgtgtcagggatagtgtaaaaggatttgttaataatgttgtttctttggaagaaattttatccggtatcaatcagagccgtatcaataaagaactgatccgggaatacagcagacagatcgcgcagaacaatcagcagttggagcagatacggacattcaaaaccagtctttatgaaaatatggtaagcggattgatcgagaagcatgagtttttaaatttgaagaacacctacaatgttcgtatcgctcagcttgaacaggcaatagccgctttagaagaaaaacggacagatgttatggaaaaccgcagtgaacgtaaccgctggattgagaacttcaagagattttctgaaatcgaagaactggaccgaaaggtaatgatccagcttgttcacagtatcaaggtagttgggaaaaatgaatttcaaattgaatttaactatcagaatgaatatgagaaagcaatttctctgattgctccggcacaggaaaggatggtggtctaagatggcaagaaagagcagaaaacatatcgcagaacctatttttacatcggtttctccgtttatcaataccgctttatatatccgcttatctgtggaagataacaaaaagcgtggtaattctatcgaaacacagaaaatggttctgaaggactacctttccaacaaaccggaatttcgcatttatgatacttacatagataatggtacaaccggaaccaattttaaccgtgagggatttcagcgtatgctctctgacattgaagccggaaaaatcgactgtgtaatcgtaaaggatctgtctcgtcttgggcgtaactccattgacagcggatactacatagaacagtattttccttctcataatgtcaggtttatcgctgtaacagatcagtttgattccgaaaatcctgataacctgcacggtggaattatccttcctctgaaaaatatgataaacgaagcctattcactcgatattggtcgtaagattaaagcacaggcaagacaggatatgaaagagggaaaatttgttggcgctcgtgcaccttttggatataaaaaggatcctgatgactgccataagctgattgtggatccggtggcagctccggttgtccagcagatctttcaatgggcatatgaaaaagttggtctgaaccgcattgtactgatgctgaatgaaggcggctatcctgcaccaagcaattataagtattctaccggggaaatcacgcatgaaaatttaataggagaaggtttctggcagacacgtaccataatgaagatccttaaagaagaaaaatataccggcgatatggttcagggccatacaaaaactgttgcacataaacaaagacctgcaggaaaagaaaaccttatttctgtcgccggtacccacgaagccatagtttccagggaagtttttgatgaggtccagaagtaccgaatagaagttgccgaaaaatacaaacaacaagaaaagattccatattctccaaatatttttaaaggattgatcttctgttctcattgtggcagaagtctgcaccgccaaagagcacgccgaaaaaagggagatgtttaccgttttcaatgccttactcccagcagggttcataaggaaaaatgtgtcggtgtttccataaaagaaaatgaattgatagatactgtgatcgacattctgaaaaaggaactctccgctgctttaggagattatgcccttttagttgaggatggaacccaatggcgtaaaagggaaaaagaattgcaggatcgccgcaataccgccagccgtatgatccagcagaaccaggatcgtattcaggtattgtacgaagatatggtaagcggcctggtagataaagacgatttctttctttggaaaaagaactatgaagataaaatgagctctgccaaagcagaacttgcagaatgtgaaaaagtagccatagagataaaaaaacagtttgaacagtataagacgcttgaaaaagacgaaaaagaactgaaagctggatgtacattaactgcagagcttgtatcacgtttaattgagcgtattgaagtggatcacgataaacatgtctctatcagattccgcttccgtacagagtttcaggaatacagcaaggcggtggcacaatgaaaaaatatgtgattgctctatatatccgtctgtctttggaagatttcaaaacagacagtttaagtatttccagccagcgcatgatccttcaagaacacgctgccggcttagaagaatacggaaatgcagaactgatggagtttgtagataacgggtatagtggggcaaattttgaacgccctgctgttcaggaacttcttgatctggtacgtgcaaaccgaattgactgtatcatggtaaaggattattgtgcgataataggactaaatcagaaagaccttgaaaaccaaggcattctggcttagtcccttctttttttgaccgaaaacaaaggactttcacaataatcaagcaagccggagggtgccgctgcacacttccggcagaaggaggatatagtgggtgctatcaaagtcttcttgaaggaagttgtgcttccaatcgcgcttgcgttctgcctcgcgtcatttctcaagccgatctatatgcctgacggcgtatgcgactacttcctaatgtggatctgcgtcggcttgccattcggcatccggaggatgtgcctctggctcgttccaagcggttacggcatctccggctcagtcggcattttcgcattgaacttaatcataggcggtctcatcggaggactcgccttcttcatcgggctgctgctcggtatcattcataccatccgagaaatcatctgaactacatcgtaaacgaagagggtttgtttcttctccaatttggagtaagaagcaaaccctctttttttgttgcccaaaagccggagtatttgctggcgatgcggcgaaagaaaggagtttttaagcatgaaacgcatgacagccggtgatcttcaagcactggaattgctgatgcagaccacacccggctttgagcattttgacagcggcgcggatggcattctccctgagtgccgaagctgccgctttcatcgccccttctggaaatatcagtcctgcgtgtttgcagagtgtccctactgctgcaatcccgtttctaccctcaaaaaccaaagtggcacatctgctgccggaaaggaagtcaatcatggataacaaaatcgaagtcttcaagaatgaacagtttggagaaatccgaacagccctgatcgaaaacgagccgtggtttgtggcggtagacgtatgcagggctttggagatcggcaattcgtcacaagccatttcacggctggatgcggacgagaagatgattaccctcatttcaaatgagggtaataaacgaggcaatcccaacatgacggtggtgaacgaacctggactttacacgcttattctgagcagccgtaagcccgaagccaaagccttcaaacgctggatcacacatgatgtcatccccatgatccgcaagaccggcggctacatgacggactcccttctggaacgtattcagaaggaaccagcggtcattgtggagtttgctcaggcgttgattctggaaaagaatcgcgtaaaggctcttgagtgtgagctgaacacggcaaagcccaaagccgattactacgacgccttcatcaatccggatgactgcaccaatatccgaacgacggcgaaggaactgaaaatcccggagcgcaagttcgtccagtttcttctcagggagaagtacctgttccgatctccctccggtcagcttcttccctacaacaaggacagcaatgccggactgtttatcgtccgcgattttgtgacgtactgctacaccggttctcagacctacttcacgccgaagggcaaggatgtcatccgaatgaagttccagaaaaagtgcggcgaagagctgctttccaagatggcaaggtgatttctgtggcagtctatcgcgtaaacaagaatcgtggctatacggtcatggcgaacttccaccttcgagacaagagcctgtcactcaaggcagtcggtcttctctcaaagatgctctcgtttaatgatggctggaagttctcaaccaagggactttctgcaatctgcaaggaaggtccggatgccattctctccgcgctccgtgagcttgaaaagcacggctaccttgtccggcaccggcagagagacggtaaaggcaggatgagcaacacaatctttgagatatacgaagagccgcaggagtctacaccagaacgggaaaagccacacacggaaaatccatgtgtggagaagccagatgtggataatccacgcggggataagtacgcacaaataaatactgatcaagtaattacccaagaaagaaatactctctcaaagaactatcaatccatcaatcttgatgggatggacaggatggatgagcgaagcgagtatgaagagattatcaaagagaatcttgattacgacattctctgtcaggatccgaagttcgataaagaccgcttccgggagatcatggacatcatgctggatgccgtctgctctaccgctccgaccatccgtatcaatggcgaggatatgccgcagcaagtggttaagtcccgctttctcaagctgaatagcagccacattgagtacgttctggaagcaatgaacaagaacccgtcagacatccgtaatatccgggcgtacctgttgaccgctctgtataacgcctctctgacgatagacaattactactccgccctcgtcaaccatgatttctacgggcaggacagatcagcagggtcaaagaagccgaagacctacgattatagcctttgtgaagacactctttaatgaataccatcgtgagcattgctcggaaaggaggacagtgtaaatgaaaatcatctatcgccggattgtgccgccttagcgtcggcagcagtccccataatcattccaaggaaaggaggtaaacgcagcaatgcaggatgaagtcaacaccaaagttgttgcaatcatgatcaagggcggtaaaatctccgctgaggtgctgaaaaaggctctggacaagttcgttcaggagatcgagaaggcgcagaagcagatgaagcagcctaaaacctatcgcggcaagcagtccatcaagcatctgatgagccagaatgccgccatctccaacatcgaagtgacggatggcaacatcaaatcctttgagcggaccgccagcaaatacggtctggactttgcgctcaagaaagacgtttccgttgagccgcccagctatcttgtcttcttcaagggacgggacgttgatgtgatgaccgccgccttcaaggagttctccgccaaaacggtcaagcagaaggaacagccgtccatccggcacaagctggatcaggagaaagcccagagcaaggcgcagcacaaggagaaggtcaaggtcaaaaccaaggatcggggtgtggagctgtgaacaaacccgatgtgaagaagctcattcttctgaaccttccgtatgtcttcgccttctacttcgcggataagatcgccgccgtgtttcgtctcgcccccggcgcagcgttcatcgacaagctgacaaacggctttgccgtgttcggctctgcctttgcaaatccgctgcccagctttcatcccgtcgatcttctcatcggtctgtcggctggcgtgctgctcaagctggcagtctacgtcaagggcaaaaaccgcaagaagttccggcagggcgaagaatacggatctgcccgctggggcaagccagaggacatcaagccgtacatggacccggagttctccaacaacgtcattctgacgcagacggagttcctgaccatgaacagccgtccaaagcagccaaaatacgcccgcaacaagaacatcctcgtcatcggcggttccggctcaggcaagacgcgctttttcgtcaaacctaacctgatgcagatgcacagcagctacgttgtgactgacccgaagggtacggtgctggtggagtgcggcaagatgcttgaaaagggcggctacgtcatcaagtcgctgaacaccatcaatttccggaaatccatgcactacaacccgttcagctacattcgcagcgagaaggacatcctcaagctggccaatacgatcatcgtcaacacgaagggagacggcgataagtccggcgaagatttctgggtcaaggcggaaaagctctactacacagctctcatcggctacatctggtatgaggcacccgatcacgagaaaaactttactaccctgctcgaaatgatcaatgcctcggaagccagagaggacgatgagaccttcaaaaatcccgtggatgtcatgttcgatgaactggaagcccgtgacccggatcacttcgcggtcaagcaataccgcaaatacaagctggcggcgggcaaaaccgccaagtcgattttgatttcctgcggtgcaaggcttgcgcccttcgacagtgcagcgacacgttgtcgcatataaactctgcgtgggattttcctgcaaagaggtaaaagtgacggaaaggctatagcctttctaacaataaaaacgccgcagaccacgcacctctcgtaatccacagcgtttccttatggtcggggtgacaggattcgaacctgcggccccttggtcccaaaccaagtgcgctaccaaactgcgccacaccccgacagaacttgtacattatatatctttaatcgggatttgtcaagtattttatcaaaattttttgaaaaaattttaagtaaaattgatttttttctttatttctaaaaaaattttatgcgtacgtttatgtgacgtaagattttaaaaaaattgtgttactatttatgaaagttaaaaattatttatagggagtttaaataatgcacaaagaagttcaatttaaaaatcgggataaatttgttgaattaggtataattatatcggcaataaggaaatcaaaaggaatgacacagagagaacttgcagaaagagcttttatcagccgttcgcatttaagcaatatagaagcacctaatattattagttcgttcgctttggaaacgttgtttaatattgcggatgcgttggaaataagcgcaggggatttgcttaatattaaacttccgtctcctcaatatattaatgaggatagtgaatttgataatgataaatattaattctttatacaatagtaattttattcagttatttttaactatgtatatgaccccatataaaaatttttattattacataatagggtgtttgaaccatttctttttctcgcaagaaaaagaaacgcttcaccaaagaaaaagtgcttgctcgcttaggtcgcctaacggctccaaggggcgctcgcccccgctaatttcatcttgaatctgcgcttcaagatgaaaaagccttgttactttcccgttgactttgtgaactgccgtgaaaaaagatattccgagttcatatttattacttatcaaaaaactaagtttttagtttaaattattacacaaaagcaggtttttcagtgaacatcggtagggcgcatttatgcgccgcgtaaggtgagccaacatctgaacacgcagtgttcaatatataatataaaatattttgtttattaaggttaattataaaaattgtattaggagatgaaaaataatgatgaaaacacgtctgaaagatttacgtatttccgcaggtcttacacaaaaggaagttgcaaacgcattcggtttaaaaactgtcacttattctcgttatgaaaatggtgtacataaaattccagtaaaagtaatattaaatattgcagacttttatgatacatctgttgattacattttgtatcgtactgatgattctaaaccatacccaattaattaagtataaaatatttttaataaattaaattataaattgcaaaaattgaaggaggtttgacccaaagtgagttagccactaaaatgcaaattatgaatgttaatattgaccagcaaatgattagtaagatagagaataatgatagaatagtaacagactatgaattagcgtgtttctgtattattttaaaaattgatgaaaagaagttattgaaagatttctatgatagtttagattagtttttttgtatatgaccccatataatatttataattttacttataataggtgtttgaaccatttctttttccggcacgaaaaagaaacgcttcacctgtgaccgcacctgtatggtgcgtgtgatacaaagtatcttgttttgccataacctacaatgtcaataatatgtatactcaaaaaaagaaaaagtgctgctcgcttaggtcgcctacggctccaaggggcgctcgcccccgctaatttcttttgcgctctacgcacaaaagaaaaagccctgtaactttcccgttgactttgtgttctaccgtgaaaaaagacgctccgagttcatatttattacttatcaaaaaaactaagtttttagtttaaattattacacaaaagcaggtttttcagtgaacatcggtagggcgcatttatgcgccgcgttaggtgagctaccatctgaacacgcagtgttcaatatataattaacaatttataaataaaaaatattcttgacaaaaatagaaaaagagaatataataaaagcagataaaaggtaaccgtttaacggttgtcacaaaaaagtttattaataattaatataactgtcctgtgtcagaggacagttatattgcttttgtagtgactattataaaaaatattataatagatataaccatcctttgcacgagggcggctgtattgcttttatggacactattataaaaatattataatagtaaaaagataggaagaattgctcttcctatcttttttattagtatcttgtaaccactactgttatgttgtacttctcgttccaaacaactgttcccatatgccaaagctcatctattgatatagctccgcttccgtttatgtcaaaagttctttctgcataaactcccgggtcgtcagggccgttcttaagcagtatgttcgccggctcccaatcgctgagctccagtttctcctcatcgtcatactgtgactgctctccgtaattcggtcccgccgtcaaatccttgtcaacattgtttactattgtgacggtgtctgtggctaaatcatagctcacatcaaatccataatcttttaaatccctaagcattacaacagcacagtccagataattcgtttcagctgttccatagtgaataaatgtcggtatttcccaatcgttgatgaaacatctcaggtcggtcgctactatgtaatccttaggcgtgctgtcaaaatatgtctgaccgttggccgctctgcttgacagcaagtcccagctgtagtccatcatctttatcgtgtcaacataacgcatgtttgttgaactctcacccattacaaccgatacaagacgctttccgtttcttaccgccgttccggtaaaacagcatcctgcggctgaggtcgttcctgtttttaagccgtccgcaccctcatattcgtatgctcctcccggaagcattttgtttgtcggataatatgtataaccacggaagttaagaaatgttaaactcgtataatttaatacatcgggatagtcgcttataagcctattggctactgttgccattcctctcggcgatattttgtttctgctcgatactccggtgcagtcaacaaaataaccgttaacgccccacgctgataaccaattgttcatctcatcaacaaaattcgcttcgcttccgcataaataatcaccgattgccataaccgccgcgtttgcggaaacaacacatatcgcccccaaaagttcgtctacgctgtaagtggctccggcatccaggtacacatttgaatatcccgggtctcttgaataattagccagggcacgccctacgggtatttgtgtgtcttttgaaaggcttccgtctgctaaatgactgtatattacatataaagataaaatcttagtcatgcttgccggaggtatcggtgtgtcaggattatgtacgaataacgcttcacctgtttcggaatccaatacaaatgctccgcgggcagatatacttaccgcataagctgaaacggagcttaacagcacggttaacgctattgtcagcggcagaaaacacctcagtatttttgcggcaaaacttttctttacactggttgatttataattcaaaactttatgcacccatcaaattgtaatcttaatgtaacacaattgtaacattacaagttaagagtatacaacatatcccaggatatgtcaagataattggttcctaaataggcaaattttgtataaatagtctgctgaaataggtgtgggagcgtaagtattttgggcgtttctagaaaatattaacagtttgtaaataattcgaataaaccataatgattataaaaacattaaaaagggctgtaaaaaagcaaagccgtgatagcaaatcacacaaaggaaactctatgactacgcaaaaacagcgctgtcctcagacttttagccattaaaagagcgctgtttttgtgtaatatatttggaaaaataactttttatagtatctatgtctagcgaaaagcggttttgagaaaaaggttataaaacaaagtaagcgtactcagacgaatgaccattgctgaattgagaaatgtttaggaaacgctgtttgtttttcttgagactgcaaagctgcttttttactcctctaaagagtgtcaaaagcattggcatttgtgaatattgttaaacgcttcatactttatttatagtttaaaggatatgtttagcataccttgagtgtaacgaaaattaggttttttattcctttcagcaaaattttgctttgattttattgtaaaaaatcatcgttttgccttccgagttcggcggcaatgaaacagaattttgctgaaagggtttattgccagtcttaagatatgtttgggatatccctagatataattttaatttatttattctctaaagcgtttcgcaaatcggatatatactttttttggaaccgctttaaatatggtttggcaagaagtttcatcatagatttttttggctcaacggcttctgtaaaacatacttctgtttttccgccgtctttttcggtgaatattcctgtccagtgccctgatagattgccgttctccatgtttagttcatatcttttatatggtttgaattctgttatttcaaaggtcgtagcgtatccgcttttatcaaattcgacaaacctttcgccctctttcataaccgtgagtttgctcaggtcgctgcgccagctgtagttttcaagagaagttactatatcccatactgtttttatttcaaaatcaagcactgttgattgtgttacctcaatcattttgtatcatcctttgcgcaaaattatttctaatatctctccgggagtttttaaatataattcatcagtgtcgggcattatttcaggataccatcgaaatcttgaaaagtcagttaaataactcataccgcgacggcagttcgaaaattttttataccacttcggaaagcatttttgagtgtactttttagccaattctacggcacagctgcaataaagccctgattttgccggtgttccgcatatttgaactccgggcggactggaatgaacaaataatatgcttccgtcggtacactctcctattactatgtaaacgtggtcgtttgaagtcattatatcgccgggtctgacccctgaaaattcttttgagtgtttaccgagacccatttcagcaaatagtttcccctggtttttagcatttgtaacatagtctgagcctgcgccgtttttatcttcaaaaaagttatacataacccagcctacatatccgctgcaatccagcccgtttccatgctcatatctgtgttctttataatcataatcgctgtcttgtgatataaagaattttttccaatttggatttactccaattattttggcgtcctctccggcgccgttatcctcgctgttccagccgccgccccatatatacatcgtggaaccgacaggctccattgcggttcgcaaaaaatctgttaagcttttattcatatccgcacctctgaattactttatattcagaaaaatatgccggcggctgatgtaatattccaagaaataataatcagggaataaaattctgagaaacagtatgcctagagtaataattagggaaaacattctgagaactatattataggaaatagtattttactgtttcttctctaaagccattattttttctacacgtctgctgtggcgtccgcctaagtgttttgaatcaaaatatgcttttacaatttccaatgctaaaccgggtccggttatcctctcgcctaaacatattatctgggcgtcattgtgttcctttgccatttttgctgagaacacgtcggttacatgagccgctcttatcccgtctattttgtttgcggcaatgctcattcctataccggttccgcagaccaatactcctgaagagcactcgccgtttagaataccgccgcatacaatttccgctatatcagggtaatctgcaggaacgtctttttgagttccataatctttgtactctatgccgttttcgtcaaaatattcttttatagtatctttaagcgccacgcctccgtggtcactgcctatagctatcataacaaagcctccttaacagcattattttctatatacttgattatatcataagcatattttaatcacaagacaaaagtattaacaaatatatttatttttcgaaattcgtttaatgaatcggtataatccaaaaaaattcacatataattaactaataatacaagaattttctaataaattaatgtatactatatatgaaaacttaaaaaataaaataagtacgcttgtccgttttattgtacacctagcctgttataataatagcatagagtaaggatagaaccagaaaggagtaataatatggcagcagtaaaatcgtttttacaaagtttgtttcaaaaggaaccaagaaaatccgcttctgctgttaaaccgctcaaggacagcgtgaggatgataataataaaaagtccgcgctgattgtgcggcataaatgtgtaaaactctctccttaaaatattggggctgcgccataggcgcagcttcttttttattaaaatttattttttacatggcaaatttttgcatatttaatacaagcttagaatcttatatttcgtttattttatagtgtagaaacgtttgcaaagtccgaaataatgttcgtagcctgatttttataattgttaaatttaacagattatttctgccgcgcattacagaaatattggcaaaaattaactaattacaaatgatataatattatgatatacgtatcattgacattatttaattataattatatatttacggaaataagggttatattggtttggcgacaagtaagcggacaagtcttcaggcttatataatctaatagaaatggaggaacaatcatgaaaaaaagtcaatttttccgcaaaatgtttgcggcggctctctcggcagcgatggtattttgtacgctgaccgggtataccgccgctacggaaccggtgttcagcacaggcagcaggattcgtgtggacctaaacgcaaatgacggcaggcagaattcttacacgaataatgcttacaattggattgtatcgggaaccgcaccaacagctgcttttaacggtgttacatttaaactcagcaacggcgggaacacaggttcaggcattaggtcagccagttataagagtttgacaaagtctgacggtacgaccccaactcttacaatggatggcgtgacgattaaggacgcggataagggcggagctattaagcttgaaatttccggtctttcctcgggaacgcacactcttacgacctggcacagttattttgacaattggccgaacggcagtccggtgactgttactgtgaatggttcaaaatcaagtacggttacagtccccactcgtgtaacaaacgacgagaatgcgggtaagtcatttacgacctttaatgcttcaggcggtacggttacggttttaattcagccaacagacacaagcaaaaacggagccgtgctgaacgcgtttgaaattgacggcgctgacccgtttaagtctgtctcaggaatgaatcctaaagacggagaaagacatttagaaatagataggggtctttcttggactgcgggctccggcgcaaagagtcatgatgtttatatcggaacagattataacagcgtgtataacgcgactaaaaattcggcagagtataaaggaaacagaacatctccgaattatgctttggacgacagctattcttcgctcaacacttactattggagagttgatgaggtcggaagcagcggagttactaagggtgctgtgtacagttttcaggtagcccgtcttgcgtttcctacagctgagggttacggccgtttcgccagaggcggacagggcggacgtattgttgaggtgacaaatctcaatgactccggctcgggcagtttgcgtcaggctcttgaggtggaaaagggtcctcgtattgttgtcttccgcgtcggcggcgttatccagctgaaaagcgcactggttattccaaatgacggcggcgaagtatatgtggcaggtcagacagctccgggtgacggtataactttgataaattatgattttggtgctatgggctcatcagacgttattattcgtaatattcgtgtaagagtcggggatatggacggcaaatcaacaggcggtatgggtttaggcagctgcgattatagtattattgaccattcttcagtatcatgggcaacagacgagggattcagctcaaggtcagctaaaaatatcacttttcagtggaatataatcggcgagtcactgcatgattctgtgcattataacggtgatgaccgtacagacacagaacctcatgcttttgcggcttcaataagcggttatgttggaagctttcaccataatctgcttataaactgcaccggcagaaactggtcattggcaggaggtatggaacaagacgctctcacatacggcggcaatgtggatattagaaacaacgttgtttataactggagagacagaacaacagacggcggcgtaagacggcttaacttcgtaaataactattacaaagcaggagcggaaagcaacactaatatgcacatagtctcaatcgacggcaacgagctgaatacttatgatatgcagaaggcatatgtttcaggtaataaaatggtagcactcggaggttctgtgcttctgaatccaagcgatgacgcctggagcaaaggaaaagcggtaacggcaggcaagggcaataattcatcaggaaataaggtttctgtttccgatgtaagaagcaactcgcctttctttgaatcttatgttaacacccaatcagcagacgaggcctataacagtgttgtaaacggtgtaggcgcaaacgctcagggctgggattatatagattcacgctatataaaagaagttacaacaggaacctatacttataaaggcagcaaacaagggttgaaaggtattatagacagtcagaatgacgtaggcggctatccaaattcatctaactttaaaggcggaacggcgcctgcagattcagaccatgacggcatgcctgacaattgggaaaacagtcatgggctcaatcctaacgattccggagacggaagtgcggtaagtctgtcagctgacggttatacaaatgttgaaatgtacttaaatgaactcgccggcgactctgtagtctttaacggtgggggcggcgaacctcttgagggcaatatgattaaatcgctggttgtaaaagatactgcaaacgctgcagactggtcaatccagaacaatctgcagacaggcgatgtaatctacggcgacagagccaatacttttaccaatatatctaattatctcaaaggcgctgaatggataagagtggcgtgcgattcaaagaatcttcagtctgatgtagccgagttcactgctggaagcgcaatcacagtgtatgtaggattggatacccgagtgtcgaatctgccgtcgtggctgagtggatggacagctaacgattatatactgcaggcgtcaaatgatgtgacctataaaatatatcagaaaaactttaatcaaggcgataaggtaactctgggaacaaacggaccgccgtcaggagtggttatgtatacggcgtttgttaaacaggcggtaactccaacgccggaaccggctcctgtaaccggtgaggtaacatatattgcagaggactttgccaatggaagacaaaacgagcagagcggaacgtttacgctgaaatcctcttatgcaggcacaggcatacaaacgttgttcagttctgacggaacaacaattgataatgagtacgttaagggttataaggactttatcggaaactcaggctcaagcagtacaaaaggagacccatatttgagcggagtgaatctgtcagccggaacatatacaatgtattacctgggaagcaacaacaggggaataacaatgaacctagcaagcggttctggaacagtggtgtcagagacaagaactcagacacctgttgtaataacggaggacggaagcgccagggaactatggctgagcgcgataacatttacactgccgcaggatttgacagaaggatctttaacatttacaaacagttcaacatggctgccggatttatatgcggttaagtttgtttcataataatgacattgtaggttatttaaaacaagtaactttttattacacacacctttcaggtgtggtcacaggtgaagcgtttctttttcttgcgagtgcgaccacactttccttgaaagtgtgtgctatacatatgttcttattttgccataacctgcaatgtcattattatgtatactcaaataaaaagaaatggttcaaacacctattataagtaaaataatatatattatatggggtcatatacatagtagatatatattatttttaataaacaaaatattatatatcaaatttatatattgaacactgcgtgttcagatgatagctcacctaacgaggcgcataaatgcgcccttccgatgttcgctaaaactccgattttttagttaattaagacaatacgaactcgaaatatcttttcttacgggtcacaaagtcaacaggaaagttacagcccatttcttttatgcgtagaaacaaaaaataacagtgtgcgttaacaccacaactcaaaacttatcaacattgttggttatatatacaaactcagccgtacttcgtaacgaatacgaagtgcggctgatattgttttgcgtttactttaacttttaattcaactatattaattcgtaaatcaatgtattcaaaaaatattactatgctttccgcaccgccaataattagcacccctcagttcctgaggctgcttttattaatagccgatatgctccggcgcttctgacaaatctcagtataaccttataataaagaaacacgccatcttaattaaacaagacctttaattccttgtaatagccaactattataaccctaacaaatctatatcttattataatttaagttaacaaataatctatattattcaaagaacaaattaatcaaggaacaaatgacgcggcagtccgtcaaccataaacggagtcagttctcctattataagcggacggcagtatgccaaaaattcatccgaaacatatgttccgtcatttattatccactcgtcaggaacaaccttttcaatattggctattttatttacatcatatgtagagcatattatattatatggctcgtttgacgtcctggtaaatataatcatcttgcctgtctcgccgtttaaggccgcctgaacagcctcgctcccagccataaaagcctcggtaatgtcacgtcttgacactatgtgcgacgcgcatctctgaagcgtgctgaacacaatacccctggacttaacacctaagttggcgccaataaaatccgccaaatataaagcggttccgccaagtgatttatgaccgaaagaatcctcaaaggtcgcctgtttattgtcttcacaaacatattcgccgttagccagctttattccctcggaaaccgcaataactacagaggtttttttctttttaacagccttcacctgctctaaaaatctgtcgtagtcaaaagttacttccggcagataaattagatcgggtccaggacagtcttcagcccttgaaagagctgccgctgcagtgagccagccggcgtttctgcccataatttccacaaccgtaaccgattctgtgggataagtgtttacgtcgcgtattatctctttcagcgccgacgctatatattttgcagcgcttccataacccggtgtgtggtctgtaacagccaggtcgttatcaatagttttcggcactcccataaacctaatatcgcttccgatttcttcagcataatttgacagcttttttatagtgtccattgaatcgtttccgcctatatagaagaaatattttatatcaagctcttccataatactgaacaataatttatatgttgcctcgctttcctccacagacggcagtttaaaacggcatgtacccaaaaaagacgacggggtgcgctttagaagctcaatgtccagttcattttttacgtattcggacatatcaacgacttttttatttaaaaacccttcgattccgtttctcataccatatattttttctactcccgcatcctttgcggctttaaatacaccaaccaaacttgaattaataacagaggtcggacccccggactgacctacaacaacattgccttttaccaaagtgattatcccctttcgactaattaataacttaaaccctaaattttttcaatattatataaaataccctctctattttataatttaaacatcaaaaacatttaggagataataaataaaaatatttgacatattaaataaataatataaaatttatacaaattattatagcagataaacgcctgattttcaatgtcataatggtaaaatttttcgcagcaaaattggtaaaaaacacaagaaacctttgtttttttatttaaagtatattttaagatataagtgggaaatatataattgggtcaataggcatttttttattttcaataacaaccgcaacaaattttagaataacgccgcagacaaaatactaagaatataagtatttaaggagctgaagctttatgaaagaatttgaaaaaagaaaaaagcttaaagatatagaaggaaagtttaacctcggcaacgcctgcagcagcggtgactgcaccggtcttatccaggttgagcctataaccgacgcagaacttgagtcgtattatgaaatttataatttcggcccgcctgatatatctgaataaaagtttaactgtttccggtaaccgtgattaggtttatgcagacagaacaaaaaatgaacaacaccattaaaaactgtaattaaaacggtcagcaaaaaaacgacccccttatggcagaataaaaactaccataagggggttttaacagttattttataatctttttgttatctcatactgtatacgttcagcaaattcctgaaaggtcatactttccgtttggtctgttgctctgtccctgaccgaaacggtttcattttctgcttctcttccgccgataatcagcatatacggaactctgtctatctgccttgcctctcgtatcatataccctattttttcgtttctggaatccaattcacagcgtattccaagttctgacagcttctgatatactttttcagcatattccaaatttttgtcagataccgataacacctttacctgcaccggagcaagccaaaccggaaatttccccgcataatgctctgttaaaatacctataaagcgttctatagagccgaaacacaccctgtgtatcataaccggacgctgttttgacccattctcatctatatactcaagctgaaaattcagcggcatttgaaaatcaagctgtatggttccgcactgccatgtacgccctaagctgtcctccaaatgaaaatctattttggggccgtaaaacgctccgtctccctcattaacctcatacggcagccctttgctctcaagcgctgttataagcgcatttgttgcgttctcccagtcctcgtcgcttcccatgctgtcatccggccttgttgatagttctacagtatacttaaacccaaactttgtataaacctcgcttattaggtcaataacgctgacaatctcatccttaatctgttctttcttcataaaaatatgcgcgtcgtcctgagtgaaacagcgaacccgaaaaagaccatgaagcgctccgcgcatttcatggcggtgaactaacccaagttcgcccaatctaatcggaagttcgcgatagctgtgaggtctgcttttataaaccaaaacgccacccggacaattcattggtttgacacaataatcctcactgtcaatccgcgtcgtatacatattatccttataatgctcccaatgaccgctggtttcccacaaacttctgctcataatcataggggtcgaaacttctgaataaccgctcctgttatgaatttcgtgccagtactctattaaagcgttttttaactccataccttttggaagaaaaaacggaaatccgggaccctcgtcactgaacataaacagctccatttctttgccgatttttctgtggtcacgcctctccgcttcctcacgcagcttcaaatattcctccagttcggcctgatttttaaaagctattccatttattcgggtcagcatcctgttattcttatcaccgcgccagtacgcccctgactgctgtgttattttaaaagcttttaaagcctttgtatagcagaggtggggacccacgcacatatctatatattcgccctgctgataaaagcttattacggcgtcttcaggcaaatcgtctatatgttcaagcttatacttttcgtttctctctttcagcaattcagccgcctcttcccgagacaatataaacggttttatgggcagattttcttttactatacggcgcatttcatcttcgatttttaaaaggtcctcgtcggtaagttttgtatctcctaaatccacatcataataaaaaccacgttctgtcgccggcccaaaagcaaaatcggcttcggggtaaagccgttttattgcctgagccatcacatgcgccgcggtgtgccgcagaacatgaagctcttgctccggctcgcattcttttacagttccgtctctctcaataatcttcataataatctctcctaaaaattattaaacataaaagaaaagcacccttgaacacatagataacctatgtgtcctaagggtgcataaagttcaatgcacggttccacctcagaattttaactttaggttcaatcaaaccctatcctttaacgcaggcgtacggcaaatcttactataagttcagatatgcggctccggagtggttttcacaaatatcttccataagggactctcagcaaacgtccctctctctgaatggttaataaaagctactctctccttctcagcttttctattatgttttaagtaattatatcatgcgctctgctgtttgtcaactcttcttaaactaagtagactatagctatctgtttccaaacttattaaaatacttctttgtttctgacgcaataacgccgcttaacgccactatcgctataaggttaggaagcgccataagaccgttaaatatatcggctattgtccaaacggcagatatagtcatataaggcccgaagaaaacagctaatatgtaaatccatctatagacctttacagcctttaaatttccacccgataaatactcaagacacttttcactgtaataatcccagccgagaatagtagtaaatgcaaaaaacaccagacacagcatgattataaaggccggcactgcaccaggcagaaaaaacagtccattttgaaaagcgtatgtagtaacacctaccccctcaagcgccaattcaggtctccatgctccggtgataactatacacagtccggtcatagtgcagataacgactgtatcaataaatgtgccggtcatagtgacaagaccctggcgcgccggttcctttgtttgggctgccgccgccgctataggcgcggaacccaaaccagcttcgttcgagaatattcctctggctacgcctttctgcatagccaaaaccattgccccaagcatacctcctgcggccgctttaaaaccgaacgctccggctataatctccccgaacgccgccggtatcgcctttatatttacaataagaataattacgcagaccgtaacatataagattgccataaacggaacgacaaattctgatactgttgaaattctctttattccaccgatgattacaagtcctgtacaaacagtaacaataattccggttataataacagtccatgaatattccattccgaatattttaaccgtattgctcatgttagggtcaaaaaaattgtttacagcagaggatattccatttatctgagtgaatgttccaagtcccagcagaccgacgcagacgccgaaaaacgcgaacaactttgccagccacttccactttttgcccattccgtgttctatataataaaacgggccgcccaaaacatgtccgtccggctcaatcaccctatacttaatcgccaaaagaccctctgaatattttgtcgccataccaaacagtgcggcaataaccatccaaaaaagcgcgcccggacctccggcacaaattgcagttgccacaccaacaatatttccggttcctatagtcgccgacaaagcggtgcacaaagccgcaaaacttgacacttctccgtcgccgttctcttcgttttttactataaatttcagcgctttgggcaaatgtttaatttgcagacccctgagccgaacagtcaaataaataccaactgcaataattaaaagtataagaggaagcccccatacaaaatcatctatttttgttaaaacccgacctacgttttcaagcataatttccaccctgtctaattcccgaataatctacttataaccgggataccaatcaaaaatatttaaaaattcagttattaaaatataaaacttgctttataacaacacttataattttaataatgattcgcaatcaaacgtctatacaacataaatgacgagagtattttaaaatattgcttccgccattataaaaaattttaacataacaaggtgaattattcaagaagaatttagaaatacaaaagtaaatactataatttttataaatgctgttggatactttacaatttataaactatatttaaaaaataaaaatatcttcatctttctgcttaaaaaagtttaaaatttttatgctttgtttagtatttattattctatgtgcggttatgaatttaactatttactttatatcctaaataatcaaacctttcaggtaacaattttttttaaagcaatctatttttgatattacaactataattatgtaaaaaactttcgcctatgatcttcttttacaccgataatttgatttgttaaatatacattcacccaataccgctcctcctattatcagcaaagctccgatagcttgcgtaaacgtcataacttcatttaaaaatataacagaaaatataactgctgacaaaggttctatataccccagaattgctacagtctgtatcggcagtttgcctatggatgaaaaataaagataacatccaatacctgtattgcataaacccaaaattaaaataaacggcagacttgaaatattagtctttattacaaaaccttgtttaagacagacaaacacggcgacagtaataaaactaaataataattgcagcattgaattttctaacccttttatatccgacgcctttttattaaagataaccattacagcatatactaacgctgacataagaccgcaaaacaacccccaaaggtttttttgttctccaattgtatacccgtttatcaaaaataatccgcaaacgacaataacgaaccctagccctttagtaaaactcaatttttccttaaatattataggcgacagcgccataactataacaggtccgcagtaatattcaagagatgcaacacttataccaatctgttgatacgcttcatatagaaatatccagcttgttcccattgcagctccggatataacgacatataaaaattgctttttatgtttataaaacgtcagccttcctccggcgataaaaaatatagatataagaaacaaacttcctattaaagttctaaaaaatactatctcatagctgcttaaattaatgaaacttgccactatcccatttgacccaaacagcaaaagagcaaatatatacttaacatacgaaaatttcatagtctaatcccttcccacaaacaatgtgcctgcgttttcaccgtctaaaattttataaaaaatatcaggtgatttaccatttgttattacagtgttaatccctttggaaacagccagctttgccgctttcagcttggttctcatacctcctgtaccaaaactcgctccgcctgccgcctgcataacatttttatctatttttgtaacttttcttattagttccgtttcttccttcaaagcaccgtcaaagtcgatgttcccactttaataacaacgcgattattatgtaagctcatatttataccccacttatttcaaaagatttattgtcctttttatgttgacaaattctatatgttattatatcatttttatatcacttccaaaagagaatgtttataatgttttacattactaattagaataaataaggacggagctttactaatgaatatatctaaatatatggcctttgttgccgcggtggaatacggaagctttactaaagccggcgatatgctcagctattctcagtcggctgttagcaaaatgattaacgacttagaagacgagtggaaaatttcaatccttgaacgaagcaaatcaggcgttaaactcacatcggacggtttaaaaattttcccatatgctaaatccgtctgtgaagagtatgaaaaacttcaaatacagatagatgaattaaacggacttcaatcaggacttataagaattggaactttttcaagtgtagccactcactggcttcccaatataataaaagaatttcaaaaggattacccaaatatagattatgaattattactaggagactacactgaaatagaaaactggatatcagaaggacgcgtcgactgcggttttttgcgtcttccaacccgttctgaatttgacgcgttatatttggaaagcgacaggcttttggctgtactgcctgaaaatcatgagttatccaggaacaaaaatgtccccgtctcagctctttgcaaagagccttttatgcttctggaaaagggcgcaaaagccgaagtatcggaaatatttgaaaataatgatttaaccccgtctgttcatttcaccacctgggacgactacgcaataatgtctatgatagaaagcggattaggcgtcagcattttacctgaactgatactaaaaagggttccatataatattataataaaagaactcgatgtaccggcacaccgagatatcgggattgcaatgaaggacagaaaaactgcttcgcttgcagtaaataagtttattgagtatttaaaatttagataacaaatatattctgatacaataaaaaacctcccaaacaatgggaggttaaaattatatttctgattatctctttgagaactgtggtgcacggcgggctgctttgagtccgtatttctttctttccttcatacgtgggtcacgtgtgaggtatcctgcactctttaaaacaggtctgaactcatcatcaacttcaagaagagctcttgctataccatgacggatagctccggcctgtcctgtaaatcctccgccgttaacattaatcaaaacatcaaacttgcctaaggtttttgtagcgtccagcggctggcgaactacaaccttcagagtttcaagaccaaagtaatcgtcaatatctctcttgtttattgtaatcttacctgtgccgggcaccaatctaaccctggcaacagaactctttcttctgcctgttccgtaatactgtactgaatctgccataattatataagtcccctttcttaaaactcacgtgtccactcaatcggtgactgagcagcatgttcgtgtttgtcgtctgcgtaaattctaagtttctttaattcttttctgccaagactgttatgcggaatcatgcctgtaacagctaattccatagctttttcaggtctttgctccattaagtccttataagaaacttctttaaggtgaccaatataaccggtatgtctgtaccatttcttttgaagaagcttgtttccggtaagaacagcgtctttagcgttgattatgataacatattcgccgcagtcaacacccggagtatattccggacggtgttttcctctcaggattgtagcagcctgagctgcaactctacccagaggtttgccggcagcatcgataatgtaccatttcttttcgatttcattagctttagccatataagttgacatagtaatgaatacctcctaaatttataattaagttaataagtttacaaaataaatgacgtctccttaaagacgtcctctctaacttgcttagctattataatacggtttcataattttgtcaagacttttttgcaaaaaattaatttagctaaacacaaactctttattttagctattttctctctttatctcgtgtttgctcattcgctatttacgattttgtataatttatacaaacataataaaagctttatatttatactgctatattgttattaggaatgatgtatggtataataagtatgaaatgaatatccttttaggaggaacacattatgaaaaaaatggcttttatttttgctttaactatcgttttaacttttttatggagctatactacaaatgcagatactgcaggcaaagaagctccaatatttataaaagacggcattgaaaccgaatttagcgatataaaaccttttgttttagaacccggtataacgtatgtccctgcttcttgttgtaataagatttttaattccggtttttcatatgaaataacagatgaaactattaagcttatacaaaaaggcttagaatatgatacaactttaactgccggagttaaccgcaatacgatttttgtcaataacaaaaaaacaaagattgattatgagccattaactattgacggagaaatttatattcctttaaggtctatagccgaagctttgggatacaaagtatattataatgaaattatctattttgataaagcggcatctaagaatgttgctaaagactctattcagttaaattatattcttgcagatgtttatatatggaatgaagatcctaattcatctgtagatggtatacgatatgctgttactcaacataatgacagccaaacaaacataactgatatatataatagaaaaacttctaacaaagaagatatatttaatatattaaatattgaaaaaggttcattagttaatttatactctctttatcaaacagaaggctatagagtgccatgtggatattggggagaattaatgcagaatttacgtgaccaaaactataatccaatactaactgaaagatggattggtgatagttcttcttctgatatgataatcttagggataggtgaaaattcagatcctgctatctcatccatactcaaaagtatgggggaggataatcttcgccaaaataatggagaagtttaccgactatcatattttggcacctttagcggcaattatgttttaagaatcaacctcaattctgacggtacttcaaccgtaaaatatgtttataatttaactttgtcaaaaatggataatacaaatgaaatccaagaaaaaacattgactaaagaagaaactcagttagtaacgaaaaaattctctgaaactgatttttggaatatgccgctaaagattcaccgcagcggagctgatgggatggatataataattgaagcagtaaaagatggaaattatcatatggcataccgctggacgcctgtaagcggcagtttttttgaactttatgaacagcttgaaagtctccgtataaatctattcggcgaagagtaaaaaagattattaaacaaaaaaccactgctttttagcagtggtttaatattaaatttctggagctggtgatgggactcgaacccgcgacctgctgattacaaatcagctgctctaccaactgagctacaccagcacagctgccgttaaaatattttaacgcgtcaacgaatgatatattaccacagaatttactgcttgtcaacactttttttaaaattttttaaaaaatatatttttggcaagtgttgcatgagaatttttaatatagtataattttaaaatacaattatattctttacacttaggacaaaatttatgaatattatcaagatagaaaatttaaacaagtcatttataaaatccaaaagtccatttaaaaaaatttttggttctttatttggttctcaaaaatttaactctgcagaacttttttatgctctcaacgatataaatttttgtgtcaaacccggagaatgcgtcggagtcattggaaaaaacggctcgggcaaatccacactgctgaaaatcttatcaggaatttctggctatgacaatggatcatgcgaagtaaaaggttcagtttcctccctgctggagctcggcgttggattcaacccggaatatacaggcatagaaaacatatacttaaacggtactgttaatggtctcagtaaaaattttattacccgagacattgataaaattttgaattttgcggaaatctcacctgaatttgccagattgcctgttagaacttactcttccggaatgctggtgcgtttgggttttgcgtccatgatatggcttgatacagatattattttagttgatgaagccctggctgtcggtgattaccgttttcaaacaaaatgttttaaaaaatttgaggagcttaagaaaattggcaagacaattctttatgtttcgcacgatattgattcagtccgcagattctgcaccagagcaatttggttagataacggtaaaattattgcaaacggcgatgttgcaactgttacatcaaaatatattgaaagctgtgtaaatcccggcaataaagctcacggtcaaaaacagagactcaccggtgccttaaaccattacggcagccatattggagcaataaaaaacatttctataccaaaaaacggggagttttatctgcatgaaaacgttaggattacagtcgatgtatatatttccgatgatataagccttgatagtcttggagtgtctatagcgctaaaagacaaatttggtcttgatttgatagtttttcaaactgacgaaccgcttcattacggaaccaatcaaataaatttttgttttgaaaaccgccttaactcaggcaagtacacaatagcagcaggtcttgaaaacaagaacagtctccccatcacttattacgagtatattgaaggagcagcggagattaaatcaattgctcctccgcaaacttttggattaatatccgctccatgcaaaatttatgtgaggtgataatttgaaacgcagaaagaagcccacaatgactttgttaaacgccgccggcggaaaaattatcaatattcgtttatggattaaaaaacttatatgcgatcttaaaagctataagcgccgtaacatcaaaacgacgccgccgcggcttattgccgataacaaatacccactggatatatccgttattgtgtgcacatacaatcggcctgaaaaacttgccaatgctgtaaagtcactttgcggtcaaacccttccgtcggagaaatatgaaattattattgtaaacaacggcgaggaacttaacaatacctttgaagaatacaatgactgtgatataaaaataattaaagaagaacgaaaaggattgacttatgcaagaaatttgggtgcgacagtatccaacggaaaataccttgtctatattgatgacgacgctattgcagaaccgcgtctgcttgaaacaataaaaaatgcttttgacgcacacagcaatgccggaataatcggaggacaaataattcttaaaacaccggaacccaaaccaaatattatacttgagggaaaagaaactttatggagtgaatacaccgttccttacaccaaataccgtgagataaacaagcaatatgaatttccgttcggggctaacttttcagttagacacaatatatttaatgctgtcggcggttttgatgaaagctatgggcgtgtggggaacaactatgcaggaggagaggaaaccgttctatgctttaaagtattaaactgcggctgcaaaataggcatagagccaaaagcagttgtctatcatgacgttgataaaacccgttataccaaagaacacataaaagagaccataaaagccggaatctttaccacttaccgtctgtacaaagatggatacagcccggcggcttgggataaaaactatgcgttggaaagaataaaaatagcagaacgtgaaattgaaaaattaattaaaagcaacgctgacgagctggaattatactataaggaatgtgaaaaaaatggctttattgaattggctgactcgatttgcgaataagaataatgacatacatcatttaactttctccgagtataaaaacaaatttaataatatttataatatttctgtaagagaccttaaaaacttaggagaaactgggctggtctcaattgtgttacctgtgtataatggtgaaaaatacctaaaacatgcaataaattcagtaatatcacagagctataaaaaaatagaattaattattgtcgatgatggttcagatgataaaagcggcagtattgccgaagaatacgcaaaaaacaataacaatatatttgttatttctcataacgctaaccgactccttccgaccgcacttaattcgggttttaaaatggcaaaaggcgagtatttaacatggataagccatgacaatattttgcttccgaaattcatagaaaaaatggtacaggaacttgattattataaggacgccgctatggtttacggaaatatgaaattgattgataaaaatggaaacgtattaagagggaaaggctggtatgagtatccgcccatgagcggcaatgtaatacttccaaccggaacggataatctaaatataactgccaataatactattggcgcagcatttatgtacagagcatctgttgcggatttaatcggcgagtattcaaacgataggtttggtatagaagattatgactactggatgagaataaatgaaattttccccataaggcatactgagttctcagaacctctttatctttatcgatttcatgacgattcgctgacttccaaagacgaagagttgggaataacactgaaccggcctaagctcatggaatttgatgaactcagacgaaacttcctgcttcttcaaaatcaaaaggacgctttagatggaaaagaactgcttaaatcaaagattgataaacttaattcaataactttggacgagttaaaaaaacttttataactattttgaaaatatttgaaattaatttttttatttgtacatattttaatttaggtcataatattattgatacagaattgtcaaataatttttactgtattaaatataaatttctgtttaaaatctcaaattttttgttgattttggcaaaagttaaaaaaaagtttctccaaccacaagatatgacgttttttgctcatattaaataatattatttatcaatacgtacaaaaatgaaaagtatattttgtgcaactttctgagcatttaaaatagacaaaaatttctaattatgataaaataaacttgtataaaatatataataattctataagtattgttttaatatggagcagaataaatttttaggagaacacaattatgaatgattttgacatttacaaaaacggaaaaaagagggatgccggaacctatatagacgatgctccaatgtatttgtttaaccagggagtaaactatgaatcctaccgtatgctgggagcccacaggggcaagtcattttccggaaaagacggttatttgtttgctgtttgggcgcctcatgcaaaaagcgtatccgtagtttgtgacggaaacggatgggacagaaacaagggcagaatgtacaaacatatggattttgggatatgggaagtttttttggaaggaattgaaccgggacagtgctataaatatagtattgaaacattccgcggagatatatttcttaaatcagacccatacgcattctatagcgaagtcagaccggccaacgcatctatcacaactgaacttgactatgaatggaatgacaaaaaatggatagataaacggacaaaaacagagccttatgacaaacctataaacatttatgaaatgcacttttcatcatggaaaacgcacgaggacggaagctatttaacttataccgaaatggcggacgaacttattccgtatgtgaaaaagatgggctacacgcatattgaggttatgcctctctcagaatatccgtttgacgcatcatggggataccaggttacaggttattacagcgcaaacagccggtttggaagacctgaagaactcaaatactttatcgacaaatgccatcaaaatgatattggggtaataatggactgggttccggcacattttccgaaagacggctttgcccttgccaaatttgacggcgaatgcctgtttgaacatcctgacagcaggagaggcgaacataaagaatggggcaccttagtatttgactggacaaagacagaaatttggtcatttctaatttccaacgccttattttggctgcaggaattccatttcgacggcttgagagttgacgccgtatccagcatgttatatcttgattataaccgcaatgacggagagtggctgccaaacaaatacggcggaaaagagaatctagaagctatagaattccttcaaaaactgaatatggcagtatttgaacgcctgccgaacgttatgatgattgcagaagaatcaaccgcttggggaggagtaacatctccggtgaataaaggcggtctgggatttaactttaaatggaatatgggctggatgcacgatgttcttgactatatgcagtgcgacccatactttaggaaaggaaaccactataaacttacatttccgatgatgtacgcttttgctgaaaattatattcttgcactttcacacgatgaggttgttcatggaaagcgcagtctgattgacaagatgtggggaacatatgaagaaaaattcagcgaactgagactattatacgcctatatgtattctcaccccgggaaaaaattattgtttatgggcggtgaatttggtcagtttatagagtggcgttttgccgaacagcttgactgggggcttgaagaatatgataaccataaaaagatgtgggaatattccgcagctttaggacatttttatcaggaacatcctgccttctttgaaattgaacgcgagctttcaggcggcgaatgggaaggttttaagtggcttaaagctcaagattgcgaaaacagcgttctcgcttatctgagactttccaaagacaagaaagacgagatattggtcgctataaactttactcctatagaccatgctatttacactataggagtacctgaaaacggtgattacaaagttgtattaaacagtaatgacaaaaagtttggtggggatggaagcggcaataaaacatatcatgctaaaaaaataccatgcgacgagtttgattattcaatagatataaccttgccggcgcttacggcactttatatacaaaagctgcctccgaccaaaaaggttaagaaagaaaaagttgtaggcttagttaaaaaacagacgagcgaaataaaaacaatagaaaataaaaccaaagcgcttgcagaaacagaaaagtccgaaaaataaatctatatttatttttggaagtaaagcgaacgttaattgtaaaataggaggagataaaatgaggttaaaagaatgtgttgctatgattcttgccggcggacagggaagccggctcggaatactcactcaaaatgtagcaaaacccgcagtaccatttggcggtaaatatagaattattgattttccgctcagtaactgttctcattcgggtattgacacagtgggagttctgacgcagtatcagccccttgagctgaacacatatattgcaaatggacagccttgggatttggaccgtactaacggaggtgtttttgttcttcctccatacacatccgcagaaaagggcgaatggtataaaggaacagcaaacgcaatatatcaaaatttagggtttatggaacagtttaatcctaaatatgttattattttgtcgggtgaccatatctataaaatggattataataaaatgctgtcggtgcacaaaaaggcaaatgctgacgcaaccatagcagttattgaagttccatgggatgaagctcccagatttggtatcatgaacacaagcgacgatatgcagatagttgaatttgaggaaaaaccaaaagagcctaaaagcaatttggcttctatgggagtttattgtttctcttgggatgttcttaagaaatatttaacagaggatgaaaacgaccccgaatcagaaaacgattttggaaaaaatattattcctgctatgcttaatgacggactaaagcttatggctcacagatttgacggatactggaaagacgttggaaccatacagagcctatgggaagctaatatggaacttttagatgaccagccgggttgtgatttggatgatgatacatggaaaatattcagcagaaatcctgtaaagccccctcaatatgtgggcgaaaacggttctcttaagaatagctatactacggagggctgtgaaatttacggccgggttgaacattccattttgtttgaaggcgtaactatcggagacggggctgttattaaagactctattatccttccgggcgcggctgttaaaccgggcgctgttgtgaataaatcaattattggttcagacgccgtaataggtgaagaagccacaataggaagcactgccgataacgcaaacaaatcattttataatactaaaatatgcagcgatgacattacattgataggaccaggcatagagataggagacaagattgaaatcggcgtatgctcaatggttacagaaaatgtataatccgtgcatgaagaaaagtagaaatagaaatttagtagaggtgatatagatgaaaaacgatatgctgggcgttatattttctgaaaacccggaagccagtatgggcgaactcacaagtcttagagctcttgccgctgttccggttggagggagatacagaattatagatttcatattatcaaatatggtaaattcgggaataataaaagtggggattacaactcctgttaattatcagtcgcttaccgaccatttaggcaccggaaaagcgtgggatatggacagaaaggacgacggtctctacatactgccgccgaaagacaccggtgagtcaggtattgaaacacacggcggtgtggatatattacatggtatttcttcatttttagctaaaagcaaccaggaatatattcttgtttcagattgtaatacaatctgtaatatagactttgacatggttcttgaagaacatttaaaaaatgaagctgattttacactggtttatacaaaagctaaacatttgagcgctaaagatgtaaaaaaacatattttgctcgatatcaatgatgaaaaaattgttactgacatgcacgtttatccaagcaaacaaaagacagactgttcatatatgcatatgtttataaccagacgcgaattgcttatggatatggtagaatatgcagtcacacacggaagacatacaatttccaaagacatattgcttacggctgtttccaaaggtttaaaagtttctacatatgagttcagcggctataaaaagaagattgacagtatacaatcctattactgttttaatctagaccttcttaaaaaggatatacgagatgaattgtttggtctaaacacaaacaatcctatctttacaaaaataaaagacaccgttccaactaaatattctaaatccgcagaaataacgaactcatttatagcggatggatgtaagatagaaggaacggttaagaacagtattttgttccgcggtgttcacgtcgcaaaaggcgccactgttgaaaactgcattcttatgcagaactctgagataatggaaaactgtctcctggaaaacgtcatatttgacaagggtgtaatcctgagaagcggtaagaaacttgtgggtcaagatacatatccaatggtaatcggtaaagaaattatagtgtaattattaactcactttttttataaacggttaatgttactgaagaaaagcttagtgaaaggatgtgttttcaaatgagtaaaatatttatggtttcatcagaagtttccccgtttgcaaagacaggcggcttaggagatgttgttggttccctgccgtcagcactcggaaagctgggagatgatatcagggttgtaatgcccaaatacggctgtattcctcatgaatatctggaacaaatggagtttaagttttttatatatataccgctcggatggagaagaaaatactgcggagtatttgagcttgaaaaagacggcgttatatattactttatcgacaacgaatattatttcggcgacccttatctatacaagtggaacgacctcgaaagatttgcattttttgacaaagcagcgctggaaatattaaaacatcttgactggaaacctgatataatacattgccatgactggcagaccggtatggtgcctgttctgcttaacgcatattataataaagacacgttttatcagggaataaaaactgtatttactattcataacctgcgctatcagggaatttactctattgacatcgtttcggatttcttctcacttaaccgtgacttttttacagctgacaaattggaatttcatggctgtgcgaatttactaaaaggcggtatagtttattccgactatatcactactgtaagtccgacatatgcgtcagaaatacaaaccccgatgggcggcgaaaagcttgacggattattatctgcaagatcacagtctttgtatggtattttaaacggtatagattacaatgtttataatcctaaaacggacaaatatatatttgagaattatgatgcaagaaacgttgtaaataaaaaaagagaaaacaagatgaagctgcagcaacagcttggattgaccgtagacggcgaaaaagtaatgattggtatcatatcaaggcttgttgaccaaaaaggttttgatataatagcagaagcaatgggcgagctaatgaatatggatattcagctggttgttgtcggaaccggagaagcaaagtatgaaaatctgtttagacataatgcgtggtgcaattcacaaaaaatgtctgctaatataatgttcagcaatgagctggcacacaaagtatatgcttcatgcgatatattcctaatgccgtcaatgtttgagccttgcggtctcagtcaaatgatttcacttgcatacggaaccattcccgtagttcgtgaaaccgggggattgaaggattcaattatgccgtataatgaattcaccggagagggaaacggatttagtttctatccgtatacttctcatgatatgatgtatacattaagatatgccattaaaattttcagtgataaaaaagcctggaccgatttaattaaaaatgctatgagacaggatttttcatggaacgaatcggcaaagaaatatcaggatatgtataataggctgctaggttaatttttgatttaaaatctattttaagcccgtaagaatcaatttattcttacgggcttagtattatataaaaatataatataaaatttattataataatgttttaatatattagtctaaattattaaaaattataaatttatttttttctaattgttttttgaaaataataaaatataattattaatatgtttaataattaaacagctaccttacattaaataaaatttcttttattgtatataacctttatattaacatatttttataactttatctaaattaattctgctatccatgactgcgcacctaacgaggcgtctgccgccgccctgccgatgtttgctgaaaattatcttatttttttatagttctcaattttaattatatcattttttctttttactcctatccatttaaaatggagctagtaattttcactagaaaacagtctcatatatttattatttattgattatgattttacctaaataattctgttatccatgactgcgcacctaacgaggcgtctgccgccgccctaccgatgtttgctgaaaattatcttattttttatagttctcagttttaattatatcattttttttttaagcaatatagtgagcgaagctggagagaatccaacggtatactatatgggaataaacctgatagcgcagaaagataatgcgggaataagttattatcagtataatgcacacggagacataacaggtttagaaaacacaaaaacaaagatgctgacgagatacgagtatgacgcgtttggaggctcaaaggaaataacgggaacagtatacggatataacggccagtatacagacaaagagacaggattgatatacttaaggaaccgttactatgacccggaaacaggaagattcacacaagaagacccggtaatggacggacagaactggtacgcatactgtggtaataatccagtaaactttgttgacccaagcgggctggtaaatgttgaggatgaagatcctatacaggattattgttcaaatcaaggtcaagttgttggacaggaaagaataaatattaatagcgcaattcatgcttatcaagatggagttttgtcctatgaggatatgttaaaaaatgttgtactcaatggtggaactataaaggaagaaaagaaacttgatgctatccaagttgaagaaacaaaaaatggttttacagtaactgcgtatgtaagatattctgggaatttaagtaatgtaagttatgaaggtaaaacatattcagaatatgcaactgaaggaatcgaaaattattggagtggcactatagatggtattactgtaactactaaggtggttacaacagatgatggaatacataaaaggaaagatatgaaaattgagaatggcagttataaggattcaagtacaagtcaaggtacaaataacatttttcctaatggagtatcaaaggtactttggcaaaacaatagcgaaaatataaatcctaatactgatctatttaaaatagtagcggctcacgagtttggacatttattttttaatattaatgataattgtagagatgcaagacactatcaagttccagtgagtaaatctattcatgcgtactcggtaatgacgcgaactaacatgataggtctatcatcatcaacattagatttagcgtttatgataaaaaattataaaataagtaatttttcgcaaggaattttttattcagattatactaatattttagacagatattctccaggttggtattataaaagattttatgaagattaaaattgtattagaaaggaagatgaatttataaatgaaaaatttacttaaaaaaatattgttattgatagttgttatatgttcatttttttgtagtaacgtgtttgcaagtgaacgggttataagaaatatgacaattgaggatattgcggaaaaaaatttggagttaaattggaaaaatgtcattccaaaagaacagttaagtcctggaatgtatttttgttcaggtgtatataactttggaactacatttcactattacgatatgtcgaatgatatatcaaatgaattatttgtagataataatggtaatataacattaaatccaataatttttcagggtggtattgcaattataaaaacgacagataaaaatttagacgagcataaaacaaactataaatatggatgtataaatagtaaatatgaatggataattccacctatatatgagagaatagtgtattgcgataacggttttattatggctgagagaaacaaaagaatatatatatttaatatttacggagaagtacaaatttcttttagacaagatgaattttatgcagagttttctactggtgatgttattttaaaattaagtaatctaaagactaagagtcaatatttgttggataatagttttaatattataaataagtatgacttaaattcaaaagaagaaaaggaagtaagtcaaggaggttatatcacttttgataatagaattaaaaataatatatattatagagctgatgaaaaaaataacgatataataataaatgggtataattcaaaaggtgaattactaaacgcactaaatttaagtgataaaattggtaaaaaatttaatatttttacaagtcaaatattaaataatggagatctaattttatgtttaaatgttgaaaatgatacacattgcattgtactattttctgcattaacaagtgattgttatacatcttattattttaaagatggatttccatttgaacaagtatatagtttttataatatgttagtatttgataatggaattgttatggataataacttagaatatgtgggtcatttatataacaatgataattatgaagttaaaatttttgtaaataaaggaaaattaatatgtagtttactaaaatatgcagattcatcagatagtatattcagtaaaggtctttaccagttaagtaatgtatacatagtttataataataaaaaagatttgagtaatgatgatatgcttgtagacaaaaatagaataagtaaatatgttgaacctaaagatgtttatggtgaaataaatatatacttaaataataaaagattaaattttgatatagagccgataacagaaggtgacagaacattagtgccaatgagggcaatatttgaagcattgggagcagaagtagaatgggaaaatgaaacccaaacggcaacagcaacaaagaatggaataacagtatcagtgacaattgacagcaataagatgcaaaaaaatggagaagaaatagaattggatgtgattttgctgaccctatggcaagatataaagagataacagagcaaacaacaaaatcgaatcctgaaacaatgggcagatttcatacaaattggctcaatatgatgtatcccagattgaggttagcagcaaatttgcttagagatgacggcgttatctttattagtattgatgataatgaagtgtttaatcttaaaaaggtttgtgatgaagtatttggagaggaaaattgttgtggtattgtttcgcgtttaatgaaaagtggcggagcaaaaggacgatttttttcacctaatattgagtatatcttagtttatgcaaaaaatatgacaaaaataggttgttttagagagtctatttcagatgaaataattaaaaaattgtatacatcggttgaagaatgtggagagcgaaaaggtgaaaaatatcgtccctttggtctatatcaatcttctttagatgcaagacctaatcagcggtattatatagaatgtccagatggaacattagtaattccgccgggcgaaactatgccagcaatccacaaagacggtgagatggttataccaaaaaaaacagatggttgttggcggtggagtagagaacgatatattgaagaaaagctaaagggaaatattgcttataaaaaatcaaaaggtgtgttgcttaattcggatggacaaccggcagaatggaacatatatacaaagatttggttaaatgaccgtcaagaggaaggaatggttcctgttgatttaattacaaagtgggaaaatagacaaagtaaaaaagaattacaacagttggggataccttttgaatttgcaaaacctgttgacttaattaattatcttataagtattgttgggaatacaaaagacagtattattcttgactttttctcaggttcggcaacaaccgcacatgctgttatgcagttaaatgcagaggacggaggaaacagaagatttatatgtgtgcaattgccggaactttgtgatgaaaaatcagaggcgtataaagcaggttataagaacatctgtgaaataggcaaagaacgtattcgacgtgccggaaagaaaatcattgaagaaaaaggcggtcagattggaatagacgacgaagaaaagaagccgcttgatataggttttaaggtattcaaacttgatacctcaaatcttagaatatgggataatacgccgattacgggtgataatcagatagagatgtttacagagcgtatgaactctatgatagacagtatcaaagacgacagaaccgatatggatgttgtctatgaggttatgctgaaaatgggagttccgcttgatattcctgttcaatacatagaagttaacggaaaagtagtttatattgtgggcgatttccttttaatgattgcactatttgataatataacagcagaagatattgaggcaatagctgaatatgctccggcaaaaatcatttgtgccgaacacggatttgcagatgattccgcgctgtcgaatgcacattatattttaaaggatagacaaattgaattgaaactgatatgatgtacatgggttccgtaggggcggattccatatccgcccgaataatcaaaaacacatttatacaaacaattgacatgtatgaatatatattgtccgatttttgttgtaatgcaaaaccatttccgttgtataattgcaatccaaagggatgtggaaacccgggcggatatggaatctacgggcggatatggaatccgcccctacggaaccatatatattttgtgggttgattatattgaaaaattttaacggttcaaataatgaattgttataatcttaaggtgataaatgatgaaactaaaatttaaaaatcaagactttcagacggacgctgtaaatgctgttgcaggtttatttcaggggcaggaaaaactacagtctactttcgaaattgttcaggatgcgcagatagggttatttcagaatgatttgggtattggtaatgctataaatatatccgatgagcagttgtctcaaaatatgcaggaagttcagcgacggaacaatcttcctacaacggagataactgacgatatgcgttctttctgtattgaaatggaaacaggaacaggtaaaacctacgtatacactaaaacaatttttgagctgcacaagcgttacggctttacaaagtttattatcgtcgtgccgtcagttgcaatccgtgaaggtgtatataaatcatttgaaataacaaaagaacattttatgaatcaatacgacaatgtgccgtgcagatattttatatacaactctgcaaagctgtccgatgtaaagcagtttgcaacaagcagcaatattgaaattatgataataaatatagatgcttttaaaaagagccaaaatattataaatcaggcacaggataaactgaacggcgaaacagctatgcggtacattcaagacacaaatcctattgttataattgatgagccgcagagcgttgacaacacgccaaaggcaaaagaagctattgcttcacttaatcccatgtgtgtatttagatattctgcaacacacagagataagatgaatttgctttatcgattaacccctgttgatgcttatcaaatggggcttgtaaagcagatttgcgtatcttcaaacacggtggcaaatgattttaataagccgtatataaagctggtgtctgtatcaaatgataacggcttcaaggcaaagcttgagcttgatatacagaataaagccggtgctgtttcaagaaaaacagtaacggtaaagccgaataatgatttgttcctcatatccggaggcagagatttatatgaggggtattctgttgccggaatagattgtacgcccggaaaggaaagcatcgaattttcaaatgcggaatatgtcgcgcttggtaaggctatcggaagtgttgacgagaatataattaaggaagcacaaatcagacgaacaatacaggctcatttagacaaggaattgcgatataccgaaaaaggaattaaggtgctgtcgctgttctttatcgacgaggttaaaaagtacagaacagcagacggcgaacagggaatttatgctgaaatgtttgagcgctgttatgaggagcttatcaataatccgaaatatgctccattgaaaagtcaatttccagcaagcgtggaaaatgtccatgacggatatttttcacaggataagaaaggaaccttgaaaaatacaaagggtgatacactggcggactatgatacatataacaccattatgaaggataaggaatggcttttatctttcgattgtcctctccgctttatattctctcattctgcactcaaagaggggtgggataacccgaatgtatttcaggtatgtaccttgattgaccagaaatcaacctttacttgccgtcagaaaatcggcagaggtctcagactttgtgtaaatcaggacggagagcgcattgaggataaaaacatcaatatccttcatgttatggccaacgagagttttgcggagttcgcagaaacacttcaaaaagaaattgaaacagaaacaggcgttaagtttggaacgcttcagataagtttattcagcggcatgaaatataccgagacaaatacggttgagcgtactatcacgcaggagcaggcgcaaaagacaattgaagccttaaaacagtcaggcgccatatccgaaagcggaaaggttgagaagaagcttgaagaaataaaagaaattgaaatcccgcaggagcttgagcctgccaagagtgagattattaaggtgattgaaactgccggagaagtcgacacagaaactcttaccgggacaacttacaccgaaacgataattgaagaaaaagaagtctcctatgacgatgcgaaggagcttatacagcattttgagaataagggctatgtttcaaaatccggaaagatgaaggacactatgaaaaatgcgcttttaacaggtacgcttgatttgcctaaaaagtttgaagccgccagagaacgattagaaagtgttgttaaaaaggcagacagtaaattgccgattcgggatgcttcaaaagaggttattgtacatctaaaaaaacaggcgatgttgtcccctgaatttttggaattatgggataaaatcaagcagaaaacagcgtatcgtgtacagatagatactgaaaaacttgtagaaaacagcgttaaagatttaaaaaatatgccgcctataccaaaggcacggcttgtatctcaaacagcagaaataagtattcggaatcccggtgttacatatatcgaaagggaagtgagaaccgccgatatagcagatacatattcaagccttccttatatagtcggtattattagtgaagaaacacttattaaaaaggctacagttgtaagaattataaatgaaagcggcagagcgcaggactttctgaacaatcctcagacatttatggaaaaatgtcttgaaatcatcaggcacaacagacattctttggcaattgacggaataaagtatgtgaagcttgacggtcagcaatactatgcacaggaaatattcgattcagaagagcttgtggctaatcttgataaaaatgctgttgcggtaaataggagcgtatatgaccatattatatatgacagctcaacaattgagaagccatttgctaaggctcttgacgatgatccggatgtaaagatgttctttaagataccaaatcgttttaagattgaaacgccgattggaacctataatcccgattgggcagtatatttagagcgagacggagaaaagaaactgttctttgttttggaaacgaaaggaacgactgaattattcggacttcgaacgccggaacaacttaaaatccattgtggaacagagcattttaaggcgcttgaaaatgatgtcgaaatgagagtggcaaaggactggaaggaatttaaggttcagaattaaaataataatcgaaagattaactattattatacagaataaagtcaaatatttatgagaagtataaaaacatattgtttccggattttgaaatatacaattaaacgttggtctgatacgtttgatttgatataaacaatgatgcttatggttttacaaatttataatagatagaaaagcctgtcggtttagaaatcgacaggtttttttgttgcagtagtttatgggaagcttttggagattataggggaaatatttttattataataaaatcgttagatagaaggtgttgttaagccatcctgtctgccggaatgggcaaaaaacaaactggagcttgaacataaaactaaaacaaagaaaaaatcacataaggaaattgaaagataggagatacctatgttttttttaagaattaaaattgaggttacaaagggcttgtataatgtcatacttgcggaaataaatcagtatatagaaataacggacggtgaggataagacggaggctgatatattctatagtgaacaaaaatgaagatacattgggaatggtaaaccgactttgcagaagtgtatattgtatggacgggtgtgttgaagagatatttgtaagagcgctgagagcaggaaaaataaagtattaagcatggcttgtgagcagctgaaatgctaagaaaaggtgtgaaaaaagtataagcaaataaaaatatatttaaacttaaagaacatattttaaataaaaactattattgttgtctatattaaataatataagattactgcataaggagaaaaaatatggaagatataattaaaaacatttcaagggcagaggtagtaaagctaaaggatgagatatccagtcataaaggacaggtggttagtaagactttagcacagaatgaggcagtgagtgttacattatttgcattttcagacggagaggaaataagcacacatgaatcgggcggggatgcttttgtaacctgtttggaaggagtagggaaaataactattgacggtgttgattatgaaattagcgagggtgaatcaatagtaatgcctgcccgacatccacatgccgtatatgggattgaaaattttaaaatgtttttagtcgttatattttaatatgaggaataatgaatttgcagagtattgaattaaatcaatactctgtttttatatatgggaggtgaaacaaatggcgaataaagtaaagtacatatcggagctgtcaaagtcaacatcaaatgagctgtccggttatgaaagctggacagcttttttacgcagtgcagcatggtagtataaatatccgtttgaggaccagcttctgatttatgcacagcgtcctgatgcaaaagcatgtgcaagtatggaaatatggaataggaatcttcatagatggataaataaaggcgcaaagggtatagcgctgcttagggaaaacggaaaccgctatcatcttgattatgtgtttgatgtagcagatacaaatagctcatataaccgtgaggttagtttgtggcagtatgatgagcgttacgaaaatgctgtaatagaaacgctcagcaattcctttggggatttaaaagttgatgtcacagtacgggatgcggttatttgcgcagtacataatgcggtacaggataatgaggctgattatcttaatgaattaaaatatgcaaaagaaaacagctttctggaaggtttggatgatgtgaatcttaaccttagatttagacagacagcggagacctcagctgcatatatgattatgcagcgaatgaatcttcgtgacatgtttgatgaatatgaatttcaatatatcagggattttaatacgccagagaccatatcaatcttaggtaatatggtaagcgcaatttctgaggaagcgttaagagatatttcccaaacgatacgcgcagagcaaaaacgggaaagaaatcagccggaattttttgcggaaaataaaaacagggtatataatatagacagagaaacagataataatgaaaggaatgaggaaaatgacagaagaaataatctacagccggaacggagattatcagataccgaacttaacggtaccgcaggaggaatatcagataggcaaatacggaatgatgaggaaaacgtatctgaagcagtaccgcagaagcctgtactcgtcgttgatgataaaaggcgagctgttgagccatttagcggagatagacaggacagcgacagaacagatacagcagatagtaccgaaaatggtagaagcggagggagtaaccgaagcaatgaaagtcaaatacccaatgatgtagacagggttaatgaacaactttctgcattctgcggaagaaacagtactgtcggagctggtatacagctaagtcttgacgatatatttccaaacctagagcggcagcagaatattgtaaggcaagcggagcaggcggtaaacggctccgctttttctatgcccgaacagattatagacgaagtcttgacttcaggaggaaatcatcgtgacagtatacttgaaattgctgtacagtacagtaaaaacaaatcaaacaatattgaatttttaaaagagcattacagcacaggcggcaaagggtttattttcaataacagaaaggtatctgcttggtggaacccggacggaatgcgtatatcatacggtgatactgcaatcgggaaaggtcagcttttatcatgggagcagatagatagaagaatatccgagctgctcgaactcggcagatttgcaccgcaggaaacacttgataaaatcaatcaatatgaacgcagcaaagcggcaagcgcattttggtatatggagcgtggaaaatacatcggtttagcaggtccatctctgcgttagagacatattctgtaataattttagttttccattttaattttgaataacttgtagactctatattcaaatcattttatttaatttgttcaataaaattcttttgcttaatatttttctccttttctttattttgtaatattagctcctactaaattatcgattccagaaggatgtttatgaacttttataatttcattcccatttttttgaattcttttttggaattatattatatatgctattgacataattctgtaaaagaattataatcgatttattgatagaaaaaaatataatagaacagagggaggattttaatatgaaaaaaatgtttttgtgtttaagcatcataggtatgatgcttattggaatatgcggtggtacgcttaaagcaaatgcagctttaaatgaaagaaaaactgtttatgtcaattcagtagaggagtttaatactgcacttgcgtctgatacagaaattattctatctgccggaaaatacaattttgggcagagaccggttgaaattataggacttagcaatatagaaattagaggaaccgatatgacacaagtggtggttgaaacaggagatgagtgtatattttatgtagaaagctctgataacatctgttttgataatttgacaattggccatgagcttcaagattaccaaaattcattttgtcctgcagctgtgatatctatatttgattcttatgatattagcatagaaatgtgtgatatatacggatgcggcaataaaggctttgttgcttcacaatctcagaatttatctgtatttgcgacaactatcagagattgttctaagagcatagcacaacttaatgaaagtgatgtatgctttttagcatgtacattttcaggaaacggttactatcaatatccaagcaattatgcatttgatacaatgacttataccaaagataaaagtgtagatattatttgcagatattgtaatttcactgacaataaaaatcctgaattaattgatttaactgaaaaatatcacactgtcaacgctttgttcgaagactgtagatataataataatagtttttcagactttaataattatgaatcagatcctaaccttattattaatagttatcatatgaaaaatggcatgattacaattaattatttcagttttaatttcacttccgaagaaatagttgtgcctgacgatttcgcgggctatcccattatagctatagccgactatgcgtgttccagcgattatgttaaaaaaataaccttgcccgaagggttaaaaaaagtagggaataatgcatttgctgaatgcggcagcttagaatatatatatatgccaagcagcgtcacatttatcggggaaaatgcactgccttctaatagtaatatttcaatttatggagaagaaggaagctatgcacagacatatgcagaggaaaatggttttttatttaataaaaattcacatgatgtatcgaatattttcacatacataattgaaaatggcaaaataacaatagctacttgtaaaaaggatgcaagaggtactattattattccttctgaaattgaaggttatccagttacagctattgcggaaagtgcgtttgatagctgtacaaacttaaaggaaattgaaatcgcagacagtgttgaaagcattgatgatgaggcatttcacaattgccaaagcttagcttcaatacatttacctaaaagcttaaaaagtattggaaatgtaaaaattccgtgctatgttttttcgggttgtacttcattgaaggaatttaccatagatgaggactgtgaatatttttcagtaaaggacggcattttatataataaaaatataaccggaattgtatccataccgcctgggaaagaagagctttgtattccggcatctgtagaggaacatttgaccggtgattttgatagcgtatataaccaacacattacatatcctattcaagaagcggtgtcattaaaaaaaattgatgtagatgagagtaatctaaacctagcgtctgacagcatcgctctttacagcaaggatatgtcaactattatcgcttatcctcgcggaagaaagggctcatacaaaataagtgatgcgacaacaacaattggtggcgcgacatttacacattctaaaaacataacagagctttttgttcctcaaacagtaacagaagcaaaaataggctatggtcattattttggattggtatcttgccccaatattaacatttgtggatacaccggatcttttatagaaactgtggcgcaaaaagaaaaaattccctttaccccggttcagacaatggcagaaataataggaattaaaaagacagaaaaaggatataaggtagatctaaaaattgatcatgatacttctcaggatttacaaaattgcagggttctgtcagcagcatacatggatgaagaaaataaggaaataataggattttcaagtaaaggctttcaatttaataatggtgaaacttctttagatactattgaggttgcagcaaacgaaaaagtaattaagaaaatcaggatttacttttgggatagtatagattcaatgaaagcatattcagcgccatatgaagtttatatagaagaatagaataaatccataaaaaaaccgaatcaaagcttaactcaatcttttttcaaaaacttgcaaactcattttcaaacattttataaaataaaacaggagttaccgacagaagcgctgatactgaatacgtaaacaagaacatgcctgcgatgaataagtttacggatataaaagataagagctactgggcattttatgatattattgaagcaagtaacacgcatatggctgttaaaaactccgacaatgaaacttgggtgaagtaaatttcactaaatattgcatagggcagtttgaatttataattgccctattgctgtatttgtagtataatatatctaacaacaaaatctaagtttatgtgaaagtaggttaaggattaaaatgactaatacagatgaagcagtgaaatatttgtcataatattcattggaggatgttctatctggaataatcgaaatgcagatgttgttatatggtgatggtgtggattcgttgatacctgcatctgaatattttgcaactaatgcgttatttgcatgtaaaaagagtggaaataagccgtttcaatgggaagattatctggaattagaaaaccattgtaaacagctttttattccaattattgaagaattgttgatgaaatactggattttttagatgcagcagatgaagaaaaagagtcgtttttacagtctctaaacatgaaactcaaaaataagatatttcgtggtgatggatatattcatcaacttattagttttgcagaaagcttgtattctaaattagattcggaaataaaagccgaattgggtttttcttttacctcgtgtaaaaaaatgatcttatatattttcaatacatacggagccagaagcgtaaaagcgtgcttggaagactataaaaatgaaaatatgatggaagtagttaatggaaatagtaaactgcaattatcaagtataaaagagggatatattttcagaataaataaaagtgacttgcgaaaagttattaattcaaaagaagtagattgtatttgtgattattttagcgttaaagccttttcgggagattacaaaaaggtggatttagaaggatttaaaatattggtatcaaagccgtttgttgattttggagattatatatacatgccgctgttattttcgacattactaaatttgccaaagctctttcattatacttttatagcagaaaaattttttgataaaaaagtggtaggaatatatactaaaaatagaggtgatgttatagaagatttaacacaactgtattttgaacgattagttaataaagaatatatatttaaatctctgaagtatacagatggtgaggctgatgtgactgtatgtatgccggaaggaactcttttttgtgagtgcaaaagtaaactgttgacgcttaattcattaaatggagtaaatgacaatattaaagaggatgtgtataaagcaattggtgcggcgtatatccaaagcgttcgttcaataaaacgggtactaagtggaaaatcatttataaaatatgctaatggaacagagcagaatgtatatattgaggatacagaagtaaaatatgttatttgtgtgactgctgaacattttggaattatcccttcggaaattacagaatatgttgagattgataaagatgtcaatataataccatatgttgtaaatatttatgatttggatattattacacaggagtgtgattcgtatgaagaatttctagggtatcttaattttaggcaaataaatcataaacttatttcagctgtagatgaattggttgtgtttggtttatataaaaaatacggtaatagaaaaatggatattaaagatgatagtctgtatataacagattacacgcaacagttcgatgaaaagtatgccaaaaaagataaggagtgtttacaaaattttataattaattaaaatataaagtttagtttattagattatataaattatcatgagggcaatccgaaaaaaggactgctcttttttcatgccgcaaaaggaggagataacaataaaaaacagagatgattgggggaatagcagttgaacagacaggagaatacaaaaaccataataatattgcttgcggctcttttcccggtagtaatatggcttgcgttaatagcggcgggctgctatgagccggaactaaaactgtttgatttgattcaaaagtttacacaagcattaaacagaccgacagaaatacatataaacgagtatagcttaaaaactgtactcgtttttgtatttctctacgctatgggtataggcgcatatttttcaaaccgtgagaaccgtcgtcccggagaggagcacggctctgcaaaatggggcaatgtttcaagtattgtaagaaagtataaggataaatccgatagatttcaaaacctcatattatctcaaaatatgagactgggacttaacgcaaaaaagcaccggcgtaatcttaacgttcttgttgtaggcggctccggagccggcaaaacccgattttatgcaaagccgaatataatgcagtgcaacacatcatatataattgctgacccaaagggggaaatgctccgtgccgcggcaccgcttctgctggagaatggatatgatgttaaggtgtttaacttaattaacccggaggattcagacggatacaacccttttacatatatccgtacagatgaggatgttataaaactggtaagcaatttgatacagaatacaacaccgaagaacgcacagcagaacgatccgttttgggagaaatctgagattgcgcttgatacagcgttaatgctgtatttactgcatgaagctccgccgtatgagcagaactttgaaatgctgatgttcttaattgagaatacggcagtaaacgaggacgatgaggaacagtatcaatcgcccgtagatatgctgtttgatggattggaggaagaaaatccggagcatatagcattaaagcaatataaaatatttaaacaggcgtcgggcaaaactgcaaagtctattcttatttcggcagcggtaagacttgccgcttttaatttacctgacattgcaaggatgacttcatatgacaatcttgatttgggcagtctgggagagaaaaagtgggctatattctgtgttattcctgataatgataactcctttaactatcttgtcggaatgttatacacgcaagcttttcaagagctgtactatcgtgcagaccacgaatacggtggtgagctgccaatacctgttcatgtaatgatggatgaatttgcgaatgttgcattgcctgataattttgagaggatacttgcaaccatgcgctcaagacgtatttcagtaagtataataattcaaaatatggcgcagctaaaggctttgtttaaggactcatacgaaagtttggtaggcaattgtgatacgtttatatacttgggaggcaacgaacagggaactcatgagtacatatcaaaaatgctcggtaaggaaaccattgacacacgaacaagaggaattacaaagggacagcatggctcaagcaatacaaattatcagaacacagggcgggagctgttaacgcttgacgaggtacgtcttttggataacagtaatgaacttatatttattcgaggtgaaaagcctattatggacaagaagtttgatgtaatgtcacatccgaatattaagctgacagaagacggcggcgcggagccgtataagcatagtaaaaataataagcgctttaagagcgatattagctttactgaccctaaaacaattaaaattatagaatttaagacggaggaaaatataaatgaaaaaaatagagaagatagaaaagataaaaaacgtaataagaataattaaatactcattggtgctgtcattgtgtatgctgctgacaatggcgtctccggcttttgccgacgaccctcttgcagcaatcaacggattatctgattttatattcagtgcaataaaagcaataggctttattttgcttggctttggtgtagttcaaattggtttgtctttaaaatcgcatgacgcttcacagcgtgccaatggatttctaacattcttcggcggtgtggttattgcgttcgccaaagatatacttgatatgatattataaaaacttattgacaacaccctattggatagggtataataataacaaagcaaggtgataatatgagaagaaaatttgttatgatgcctatttttgataagcagtggaaagctatgggattaactgatgatgatttaaggttgcttcaagaagagctgctgaaaaatcctaagtcaggagctgtaatgcaaggcacaggagggctcagaaaactaagatttgcatttccgggtcgtggtaaaagcggcagttgccgtgtactttatattgattttgttattgacgagtcaatatattttatttttgcatatcttaagagtgagatggataatttatcaagggaagaacgaaataatattaagaagttaattgagcaaatagagagagggctgtaaggaggtgctgataatgagtgtttacgagggaataatgaatggattgcaagaagcaattgattataacaagggaaagatagaagcccgcagtaatgtattgtcaattgatccggttcctaagtttgaagctgatgatataaaaagcatacgtacagggctcggcatgacacaatatatttttgcaggagctatgggagtatcacaaaagactgttgaggcttgggaagccggcagaaatgttccgaatggtccggcgagtagaatgttgtcaatgttaaaatctgatcctgatttacttgaaaaatatcatattgtcacaaaatagataaacaaatgttaatggtgaagagcaatcaatctttaagaggatagattgctctttttgtttgcagtatagtaaaattagtgttatcggaggtgaatcaaatttgagtgataactggatagtagcaaaccttgagaacgcattttcgatttggaatgataaaatgacggagatatgggatttaataaccatgtctcctcagcagtttaaaggcggagctatatagaatataattacgaacataaacggaggcttgcaagcaatcggatacggacttctaatactattttttgcaatgagcatctttaaaagcacggcaagtttcagggactttcagagacctgaatatgcattgaagcacttcatacgttttgtcgcggcaaaagtggcaattacatatgcacttgatttaatgacagttatatatacaatatgcggcggagtggttgagcatatagccggaagccttggaggtatcagcggagcagctgtaacacttccatcggcaattgaaacggctgttgagaacgcaggcttctgggcaagcataccgctgtggcttgttacaatactgggcagtctgtttataatggtcatgtcatttattatgatattgacggtatacggcagattctttaaattgtttatgtacacggctttagctccggtcccgctgtcgtcgttcggcggcgaaggaacaagtcagatgggtaaagcgtttttaaaatcctatattggggtatgtcttgagggcgctgtaattgtgcttgcctgcataatattttcagcatttgcaagtgcgagtacgcctaatatagacacaagtattacaacggtaacaatgatatggaaatatatcggagaggtcatatttaacatgcttgtattagtaggacttgtcaaaggcgctgaccgcatcgtaaaagaaatgcttggtgtgtagaataaaataagcaaaaaattaaaataaaaataggttgtatttatcctatatttatgatataataatacagaggtgattaaatatgactgtagacacaaaactattggtaccaatgacagatgcaaatcaaaatttttcaaaagttgtgaagatggtagacgagaaaggaatggcagttattttaaaaaataacaaaccccgttatcttgttgtggattttgctgaatacgatgaaatacaagctgcaagaaataagatgatagataaagcagcggatgaattaattgatgaaaatttagaagcttttcaggagttggcaaaatgattattttaacagcggaggaaatatagaaagctcattgataaaaccggaggtttagatggagtaagagatgccggacttcttgaatcatctgtaatgagctgtatgcagacgtttgatgatcaagagctgtatcctgatataattgataaagcggcttggataactttttctatttgtaagaatcatccgtttattgatggtaataagcgtactgctgtactttgtatgctgactatattgagaataaataaaatagaaatatcgtatacacaaaaggaactaatatctcttggattacgtgttgcagaaggaagtatgggatatgaacaaataatagaatggatacgtcgacataaaatttaatagcaacataaaaataccgcagtaatgcggtgttttttatacaaaattttagaaaaggagatagctatggaaatatatcggagaggttatatttaatatgcttgtattagtaggtcttgttaaaggcgctgaccgtattgtcaaagaaatgcttggtgtgtaataacttaataaatttcaatcttgctgttgtattttacgatgaattatgatataataattacagcaaatataaaggaggaatttattatgcctaatattagacctgtttcggatttaagaaactatagtgaagtattaagagatatttctgttgatgagcctgtatttttaactaagaatggcagaggacgatatgctattgtagatatggaagaatacgaaaaaaccaaggcgactataaagcttatgtcaaagctatcagaagcggaacagtcggtgaaaaacggtgaatggatttcaggagaggatgtaaagaaagaattaggtatatgatatggcaaaaataagacttactcctgctgctgtgacagatttacaggagataaaagagtatatttctaaggaattatataatcctatggcagcagataggattataaataaaataataaatgattatacgcttcttgaaacatcaccgtttatggggacttcattatcatccatattgcctgttaaaactgattatcgctattttgtgagtggcaagtatcttattttttataaggttgataatgaatttgtttctatttacaggattttatatgggcgcagggattatatgagaattcttttcagtgaaatagattccgaaaatgaagaagaataaaaaataaacaatatttttcaccgcagtaatgcggtgtttttttatacaaaattttagaaaaggagacagctacggaaatacgaattaacaaggaaataaaggactatcatgagagcctgtttttcggactatcattccgtcagtttgcctgctccgttgcagcagtcggcgctgctgtcggagtatattttgggcttcgcaatattgtaggtaaagaaatggtgtcatggctttgcataatttgtgcagctcccattgcggcagccggattctttaaatacaatggcatgaatttagagaagttcgttatagcatatataaaaagcgaatttctctgttccggcaatagaatatataaatcagaaaacgtgctttttaatctatataaggaggttttagcagatgataaaaataaacaaaacaaatctaaaagaagaaaaaagaaaaattcctaagaccgtgcagcagtctataccaattaaaaaaatatttaaggacggtataatacagtgcggaaatatattttcaaaaacatggagatttacggatataaattatgctgtagcctcggacagtgaccagctggaaatgtttcttgcgcattcggcgattttaaacggtctgcctactgatgcagtggctaagataagcatatataacaggcaattagataaaaatgtgtttaagcaaatggtatcttcaagcaatgatgataaatattctatatatacatctgaattaaatgaactgttagcagataaaatggccgaatcaaacaacattgttcatgaaaaatatattacagtatcaaccgaaaaaagaaatatagaagaagcaagaacattttttacaagagtaagcaatgaccttacagcggatttctctaaaatatcatcaaagattacggagcttggaatcaaagacaggctccgtattttttatgagttttttagaaacgaaagcagctttgaatttaatatgaaaaaggaaatggcgcgtgggaatgattttaaggattacatttgtcccgataatattgaatttaaaaacgaccatatcagaatagggaatagatatgcaagagtgctgtttttaaaggagtatccgtcatttttaaaggacagtatgctgtcagagcttacggatctatcaagaagtatgatgctgtcagtggatattcagcccatcccaactgatgaggcagttaaggagatacagaaaaagctgcttgcaatagaaactgatataacaaaatggcagcaaaaacaaaatatgaacaataatttttctgcgacagtgccgtatgagctggagcagatgagaaaggaaataaaagaatttcttgatgacttaactacacgtgaccaaagaatgatgtttgtaacagttacgcttgttcatgtttcggacagctttaaggagcttaataacgatacagaaacgctaaaatctatcggcagaaagcatatgtgtaatttctcaacgcttaaatatcagcaggaggacggattaaaaaccgtgctgccgtatggaatcatcaatatagacgcagtgagaacgcttacaacggagagcacagcagttttaatgccatataaaacacaggagattattgacgacggagggttatattacggtataaatacaatctcacataatcttttgatgtgtaacagaaaggaactgcttaacggaaacggctttattttaggagtatcaggctcaggaaaatcatttgcggcaaaaatggaaattgctatggccgcattgtttacagatgatgatataatttgtgtcgacccggaacgagagtattcaccgcttgtgacaaacttgggcggtgaggttgtaagactgtcgtcggcttcgaaaaactatataaacgcacttgatttggaaagagactgcaataaggatgaaaaccctgtgtcaatcaagtcagagcttctaatgtcaatgttcgatcaggtgcttcaggagagctcttcacgtttgggtggaggggtaggtcctaaggataaatctattattgatagatgtgcgtctaatttatacagcagctactttaataataaaaactctttgccgcctactttaatagattttagagaagagttattaaaacagcaggaaacagaagctcatgatttggctcttgctcttgaactgtttacaacaggtaatcttaatgcgtttgctcatcaaagcaatgtagatgtaaacaagcgtattataagctatgacattctggagcttggagaacatttaaagcccataggacttcttatcatgcttgacaatattatgaaccgtgtaattgcgaacagaaagcggggaaaatatacaagagtatatatcgatgaagcacatctgtttttctctaatccgtttagctcatcgtttttattgaaagcatggaaacgctttagaaaatacggcgggcttttaacaggaatcactcaaaatatagatgagtgtcttagtaacgatacggcaaggctgatgcttggaaacagtgagtttctgcttatgcttaatcaggcggctaaggaccgtgagggactgacgcagacactaaatatatcagaggttcagataagctatataacaaacgccggagccggacgtggactgataaaggtaggcggctctattgttccgtttgttaatgagtttccttctgatacacagttatataagctcatgagcacgaaaccgggggaggaatagaatttatgaaaggtaagaataacccggagctatgcccaaactgcaaaacaggttatgacagctatcttttagataatagaagcccattctgtccatacctcagataccatgacggcacagaatgcaaaatgtttgtagctatgaaggtatttgactatgatattgaaatcgaccgggaggaatcagaaaatgaaaaataataatctttataagctcgcatatgctgatttactgacaggtatgatgaataaaaacgcatatgaagaaagactgcaaagcttcagaaataaccctgacagtataaataaattttcggtagcaataattgatttggataacttagaatatataaataacatatacggacagcatacggtagatgaggcggttaaaattactgcaagatgtattttttgatacactgggggaaataggtatgtgctatcatataggcagcggtaggttttcatgtgtggctgtcggtgatatatcaggatatgtctcggagctgcgtgatttagtttcatttgaaactgcaaacgacctgtctgtttctgtcgggtatgttaactataataataaatttaacgatattgatgaagtgataaggtattgcgataaaatgatacaagacgaaaaaaatataggctagggcactgaaaaaattcagtgtttttttctttagggaatggaggtgataattattgaaggatgtaaaaacaaagcctaaaaatgtatcagcgcctaaggataaagtgaaaagtcaaaagacgtttagcaatgctgcacaagatattaagactaatttaaaaaatcagtatattcatacaaaagcagaggcagctaataaaaataacgaggagcagaaaaatcctgaaaactatgcggtcgataatgttgaatatgaagcaaaaacagtagtacaaagcgtatacagtgcttcaagcagatatataagcagtaagctgaaacaaagaaatgagcatacggatacatacagcaatacaaataataacggtaatactaaatattccgaaaatgcttacaaccctgttaaggaaaatatacagttgaatgagcctaagcagagaaatgatgtaaaagtctgaacatattccggagccgcaacaaaaggtaattgtcaacaattaggaatgggggataccgagaaaagagatagttttattgatgttgttgctgtgtggggcaataaagaaataataaaattagaaacacgtggaaatacaacatttgctttaacgtctgataatattttatatggatggggcgataattcaaaaggacagcttggaaacggcactactgaaaacgaattggagccaatacaaattagaaccggagttaaagatattaaagccggacttgagcatactgtggtacttgatactaatagacgtgtttatgcatggggcagtaatgaatataatcagataaacagttcaaataataaaataataatgactccgtatatgataactgattattcggagttaataggagcaggagattatcaaacatattatcatggtacagattttgaactatgcggtataggaaagaatgaaagaggaatgatttcaaataatcttcattctctattttatatacaaaaaatatcgtgtggtgataaacatgcagctgccattgacttgaatggtcagctctgggtttggggcgacaattcaaaaggacagctgggagtatatacaatgacctcaaagatgtcattcaaggaaaaagaaacagtaacggaaactatagaaggaacagatacaggaggaaaaacatcatatgatgttacagctcagtcaggaggagaatatattttaaaatatgttgctaaaactgatggtacttatacatttaacactgtttcaaataatggcacttcgttagtcgttgctgcatataaggacagtaattttacaaagccatataaacagacaagtaacaatggattgttacaagtaggagctgagaaaaattcaacgatttatttaaggtatataaaccctgataatatttccttttctgcaactaccacagttgaaaaaatatctgatacagttgaggataatcaaacggtatatgcgatattatatgattcgccatatttcgaagaaggatatgcagcagacggcaaatttttaggcagccgctatcttggttcaaatcttgatgaaagatatgaatacaatactaatggaacggaaggaagcaatgagttttttaagaattatcttagcttagtgaaagataaaaatgtggtttttgttatttttataagagatataacatttgatacagatgaaaacggtatttccatgactcttgatgaaatacataaaaactatgcaacaaaagcaaatgatattacacgttttactaatgatataataacaaatatgtataaagcatatatggagcttgaggagtgggaaaagcctggtcagataccgcagatatacatagaaactccggattttagcgcggttggtattgatgaacaagaatataatttaaagaagagttttttggatttgtatctagatatgtgtaaaaaaatatataaagatgttgaaaatcatgttatcgaacttgaaaatggaaatttaaaaaaggtgcttactaattgtattgcaggactatattatggaaaagaagacccatttgattattacaaagatacaaatgaaaacgatggaaaagaattaaaaaaagaactatctgatagcatttatgcgttaataatgaaaaatgtttctgattatattcatgacgagaataaaaagctgatatggtttccatatacagctggtcagaaagaacaattgaagtgtattggtgagatagcaaatacaggcaaagtttcaaatgacaaagatttatgtgatattgttattattcagccaaattatttttattatgaaatgaatatatctgcgggtgatactggatatatggaaacgatgaacgatatttaccagagcgcagctgacaactgtgtgaagtattgggatgaagaagaacagaaatatgttactgccggcggtgagaaaacaaccgatactttggtatcatttcagatcgagtatgatatgtcgcttgtatcaggaagagatactggtgaaaaacaaaatccagtagataaagcagataagcttgcttatactatatccgtatttcatgatttaatttacggtaaccacagtgatcctggaaatatagttgagcaaaaatctttcggaatatatgccggcggaccaaatgaacagggctatacctgggaagttttaaatcctgacggaggcatgaacgtcaacacccatagtaatagaaattttgttaatttattgggagatatgggtatggtgcatttttatgaaatgagatactatctaagtgtatcggattactattggaacaaaatatcaaatgagtataatggaaaattaatttatgatataacacatatgttgttttattgtgatgaagatggaagttatataccagatccattaattacattttttggtcaagatagaataaaacaaatgtttaaattagattaggaggagtaataaatgaagaatatgaaaaagctcattatgatatttataagtattgtaatgtttataggaacatatagtgtatatgcggaaacaagcgataataatttaattcaagacggaacctatatacaaataggtaaatataatgaagatccaatattatggagatgtataagcacaaatgaagatgatgaaaacggaaagctcataataagtgatagaatattatgttataaatgtttcgatagcagaagagcagggacagatcacaaggacactggattaggtttttgggaagaatcaaacttgagagcatggctgaattctaaagaagcaggagaaaatatattatggccggggaataaccctccaaatatagaaaatgctatacgtaatccatatgataaagaaaatggattcttatcatcatcaaatttttctgaaacagaactatcggctatgaaaacagtaagtcaatggcagatattagatatttatcaacaggatgaagtagaaaatggaatatatgacttttttgagatagatggcagtttaaaaacaagaccagattatctccgttgctatggtactatatcatctctcactcatatagagggaggaatgaaaagaatagcagatacaatgtttatattagatgatatacagatatataatttatatactaagtacggtgtattatcggagcctactgaaaaggctctgaaaacatggaattatggcggtaattctatttgggctcattcgcctaactcatattggcttcgaacatcaaatggacctgcaaacgctaattatgttcaggatgataatatacgaggttataggtctccaacaataggagatttatatggtataagaccagcattttatctgaacgaggataatgtcagaatagtgtcaggaagtggggagtggaacgagccatatataatagacggaaacggtcaggaaggaacaacagtattttgccagagcaaacaattaacggatgcgcagattatagaagaaaacggagaaatattagttccggtaagagatgtatttgaaacctttggtgcagatgtacaatattatgatgtagaggacggaataataacagcaacaaatgatgagcgtacagtggtattacaggcgaataatccggatataggaaatggaacagatgttttcacattaaaagtagcgccgaaaataattaacggcagagcgatgatttcattagagggagtaaaagacgcgtatgagtgtaagacagagtatgtggaagaattagaccgaattgtaatagataagccgggaccgcaagattttggagacggagtaggaaaagaacgctggcagcgagctcgccacttgtgggacggatatcaaggtgacatagattaaagcagtgtaatatattttcacttatttatatatagggaatttgtagtgaaagtccattcagccatgtaacaaactaaataacgaacgttacgacacgaattatcgtaacgttttttattatacactatctgtaaatttacagttaaaaccttactttaaatatgaatagaccgcaataatctaataatttggatattgcggtcttatttatttgtaatactgcacaataaatcgtgttatttgcgatttgttaatgtgaaataagacgattgtttaaatatttaaaagtttttttataaaagtttgccaaaacgaccatcggcaaccgtgatagtgaatgaaaggggaaataaaccgccttgcggaaacggaaggaggtgagactctagtggagttgacttcttcccaaaagcagaccgttgaacatcaatttgatagtttttgcaagagagttctaaaataaggagagcgagaaaatattatgttataaaacatacttgcaagctgtaggcaacgaccttatatcagtataatgatacttctatccagttataatccgagcgttaaaagcgtcgcaggtaataaggatagttcgggctgatgccggggaggtgagattcctatggagcattttagcaaaatgccgtccgtctgaattattaattaatggaggcagataatatgccaaaaaaacaagacaaaatagattttgaagttgtcagtcacttttcaggcagtaaaacaatcagggatttattgaagagccttgtaatgcgtgaagtaactgatgacacatcagaaaataaaacagaaattaataacacagtgaaataattgaagtttgtaacggtttatgatatactttaaatatggaaaacaaaaacaaatgctggtttcgctgtgagaaaggagaagctatggaaaaacagcgtgcagcgctctattccagactgtcgcgggatgatggaataggagaatgtgaaagtaatagtatatcaaaccagaagcaaatgcttaacagatacgcaaaagaaaataattttgagatagcaggtcattatgtagatgacggctggagtggtacaaactttgttgaggtaagataacgataccttttttgcagagggtgttatcttacctctttttgatgtatgttagatagcataactctttacgtcggctcctatctgtctgaaataggagatactttcagtaggcttgtcgcctgtatcaactctgccgacaaagctataaaagatttcgattttgcgggtgttcgtttccttatccagttcgtgaataagaatacggtcaataaattcatggacgttttcgtaggtcagttcttcaatcgctgtgtatctgcgtaccagtgcgacaaacctttttacgtccgcgctgcgctcggtggcgttgtcgatttcctgtgacagctccgcaatcctccgggtcagcgtctttttttcttcatcatagccggaagtcagaaaagcaaattgttcatctgaaagtttccctaaagcgttgtcctcgtagagcttgcggaataagatgttcagctcgttaatacggttctgcgccttgtcaagttctttccgctgctgtgtcagcgtcttttgtactgcctttgcgctgcactcgttggcggtttcgataaactcctgttcatgctctttcacataagacgttactcgctgcaagtctgcaaggacaagttctttcaatacgcttttgcggatataatgcgtagtgcagagcatatcatttcttgcccggttgcggtagttgccgcaagtgtaggcgtgtttccgttcaagcgtcccggctccgcgtactgcatacattttgtagccgcagtccccacaaaagagcagcccggaaaacaggtcaatttcatcaacctttgtcgggcgttgccgggtggcaatccgcttctgtgcaagttcaaaggtttcttcatcaatcaaaggttcgtgagtgttggggaagaaataccttttttcctccgggttctttttcgtctttttcgacttataagataccttgtaggttttcccggttatggtatgccctaaatactctttccttgtcagaatgtcgtacagtgtcttatccggccagttgtaccatgcgttgagctgtgggcgggggtggcgtttgctccctgtcctgcggtagcgcagttccccgacggtcaatatctcattgtcccgcagccagttctggatttcacacatacggtcgccccgtacatacattgcaaaaatctgttttacgacgtgtgccgtttccgggtcgggtatcagatgattgcggttatccgggtcgataaggtagccgtaaggagcttcgccgttgacgcgctcgcctttctgtgcctttgcctgtttgacagcccggattttctttgaggtgtcgcgggcgtaaaactcgttgaaccagttccgcagaggggtaaactcgttatcttccctcgctgtgtctacaccgtcgttaatggcaatgtagcgcacttcgtattcggggaaaacaatctctatcagttcgccggttttcagataattacgtcccagacgggaaaggtcttttgttatgacggtcgccacgttcccggcttcaacctcatgcagcatggcttgaagcccctcacgctcaaagctcacgccggaaaatccgtcgtctacaaaaaagcgtgtgttgaaaaagtggtgttcgtcagcatacttttgtaaaatcagtttttggttctgtatgctttcgctttccccggcttgcatatcttcctggctcaatctgcaatataaagcggtaatcttgtctgtctgtaacattttgtcctcctttccgacgacagacaagcatggtatttgtactgtctatattataccacataccgctgcctgtgtcatgtataaaatgtgaagaaacgccctatttccgggcgtttgcggggttcagctccatgtccttgcgaatgagcttctttatctttttatccagtgtgtccgttgcgcgttcacttgcggacgaacatacaaggtaagtaacttttccgattttatgctccgttgtggtaacgggcgtctggttttgcgtcaaagaaaatccccctttctttcgcaaacatataatacagtctatgaatagcagcaagtccactattcaagaaaacaaaggctttaatcggacggttattagcataacctcatgggaatttcaccccggcatggttctcatgcagccctacccattgcctgcgacgctcttaacgctcggactgtggctgtaaggaagtatcattgtatattttgcgtgtcgtcgcccgcaagccgctacacttgctttccggcgcggtgttggtcgctcggctgtccgggcggggataacctcacccggatagcgtcatggcgcacccaccgtatggctcggcgcaaaaggaacgtatccgatttgccctatgctgcgccgccgttatcttgcgccgctttctttgtcaaggttcagaatggctttgctgccgcgtcagcagcggaacggaaaagggggagagagaaagcgtcccgccgctgcggtttattcctctgccttaaaggtgaggacagccatcatcagttttgcttgcagccgttcccgaatgtcgtggtctacgccaaaatagacgttcccgcgctcgtcgtacagcttccgcatggagaggcgggctatgtagccgctgaaatgctgcaagacaatcttcatagcgtccgggtcgccctttgtcgctgccaaaatgacaggatagggaacaagggctttttccgggtagccgggttcgttaccattcgtcccattcatcagcattttcctccagatatttttttagcagctcaaaagagcttgtccgcctgtactgtatcgtgcttctcgacgtatcgaacagctccgcaatctcggtgtcgttcattccctcgaaatagtacaggagtacggctttgcgcttttcttccggcaaagtacggattgcttcaagaagcagcttcggcgtgattttcttcccggctctttcaaaggcgatttcccctttgaaatattcatcaaaggtatgaagctgccgcgcttcttctaaggtcaagtcggaaaaggtaatctcccttgccttatgcctgtgcagctctttgtgagcgtcacacgcttcattgtgcagtaccgtattacaaaacttctggaaagcgcactgttttataaactccctgcgattaggttccacattctcaccccctttctcgttggaaagttggtggtgcttcccccttttcgcggggcaatactgccttttgaaaaaaacgccgaagattttcggatttttttcaaaaaattttttgagcagcaaaatacgcctgtccgaaaagcccggacagacgtataggtattgtaagcggtattcagatgattagacagttcatattgatagacgtagttttccccggcggtggtcgggctttttttgatgtgtcaatgaccgtcggattttgtcgatatggtatgtgcttcatggcggctacctccttttagccgccgcttttaacagtgataccgcgtcatttcattagaagataaaaagaaacggcggctttggtttttcaaagctgctgcggaaatcaaagaacgacaagcaacagttctgattttgctccaatatggttattgggggcacaaattaaatcaaaaaagagccgataacagcagtatttcaaactgcatattatcggctctgcgtctgtgcgtctggctcttttaattaaattatttttgttgttttttggctttattatatgtattagctaactgtccacaagctgctttaatctctctaccatgagaaactctcatggtaacttcaagtcctgtttgctctaattgatgtttgaacgcaaccatttcttgtttttgtggtgctctaatttttgaattactcgtcgggttgtattgcagcacgttaatcataacatttttgcccttaaaccattttgcaagttgccttatatctgaggaacggtcatttatacctggtaaaagcaaatacgcaaataccacttttcgattatgcctttgtgaataggacaatgcttgcttaacaacatcttcaatagcgtacatgtgcatatgaggaatgatgcagtttctcgcagcctgtgttgctgcatgtaaagatattgtcaactgaatttttagatgttcttcgcgcaatttttttaattgattaactggaccaactgttgatacggtaatgccgtcggttggaaagttaagtccatttctatctcgaagaatatggattgctgcaatcaagttgtcgtaattgaataaaggttctcccattcccataaaaacgatacgatttactttttgacgtatcaatatgacctgttgcacaatttcagatggtgttagattacgaacgaaaccattgcgtccggactcacaaaaaatacagccaacagaacaaccaacttgcgtacttacgcaaacagtcccaccatctcgccgtttaataaaaaccgtttcgatatacctgttgtctttcaattcataaacatacttttcagtatcgctacttttatagactttttttgttgatattgatagattttttttgtgaaatggctgtttatacaattccgcatataaggctcttgctttatcctctccaattacttccgacatttctttgtaagtaaatccgtatgggtcattcaatatttccgtaagtgtacttttaggtaagtgtttcatttaatatccttccttttgtttttcagagtttttgattatgatttctaatttttcaacatcaatgatatgtgttaatttacatttagggcagaaaagaggaaaatttcttaataccgtattataaaatacttgaaccctcgtctttccgttacaaattggacattttatccaatatttttcaagcataatatttctccttttgtgcaaaaaaatacaggtcaattctcaacatgagcattgacctgcatttatacatataacactacaacaaaattaaggcatagtttttatactatgtctatacatcgttagttttgttgtatagcatacgcaaaataagcatgacaaaaaagcccatattgaaaatgggaaaaatcttttttgatttcaatgcttatcgaatacgcatgctatgtaacataaacatttcccccttttaataatactatacaaaaaaagcggctaattgtcaacatatacatatgaattattttggctaactgattgaattgtgtagacatatccaagaagaaaggggaacagtaaaatgtaacagggtgaataactatggcaaaaagaccagtaccgaaatacgatttcaaggcttttggggcagcgataaaggcggcgcggacagggcgcaaggagagccgcaagaaagtgagcgacgaaatgtttatctcgccgcgctaccttgcgaacattgagaacaaggggcagcacccaagtttacagattttctttgagcttatgctccgctacaatatatccgtagaccagtttcttttggaaacgccgccagagaagaacacgcagcggcggcagcttgacgcgcttcttgacggtatgagcgatacaggcatacggattgtgagcgcaacggcaaaggagatagcggaagtcgaaacagagggcagataagaagtgtccgtcagaattgaataaggtttagagagcgttgtaatctttttttgaggattgcagcgtttttcttttgcggaagtttggcaaaaccgggcatagctccgtagtaaggcataagggataaaagcattcgtagcaagcataggaagcgggtacccacttccgtattttcccctcccgcgctgcggcgcgtcggttgaaaattgcttgttgggaagtgtcccaaaccctcggaacggaaaggaaaggagcgaatacatgaacggacgcaaaagaacggtgcaaatcaaattcagagtgacggaagcggaacgggatttaatactggaaaaaatgaagctcgtacccacccggaacatggcggcatatctgcggaagattgccattgacgggtatatcattcagatagaccatgccgatataaaggcaatgaccgcagagatacagaaaatcggtgtcaacgtcaaccagatagcacgccgcgtaaacgcgacggggaacgcataccaagaggacatagaggaaataaagggggtgcttgcggagatatggcggttacaaagattaagcctattaaaagcactctaagcaaagcccttgactatatcgaaaacccggacaagacggacggaaaaatgcttgtgtcctctttcggctgctcctatgaaacggcagatattgaatttgaatataccttgtcccaagcactccaaaaggggaacaatttagcctttcatctgatacagtcctttgagccgggggaagtcgattatcagaaagcccatgaaatcggaaagcagcttgccgacgcggtaacaaaggggcagcatgaatatgtactcacgacgcacattgacaaaggacacgtccacaatcacattattttctgcgccgtaaatttcgtagaccaccgcaaatataattccaacaaaaggagctattacggcatacggaacatgagcgacaagctgtgtcgggaaaatggcttgtccgtcgtcgttcccggcaagggcagcaagggaaagagctatgcggagtaccaggcagaaaagacgggtacaagttggaaaggcaagctaaagattgccgttgacgcgcttatcccccaagtttccagttttgaggaattgttgcagcggttacaggcggcgggctatgagataaagccggggaaatatgtgtcatgccgcgcccccggacaggaacgcttcacccgtcttaaaaccctcggcgcggattatacagaggaagccataagggaacggatagcgggcagacgggcaaaggcggcgaaagcccccagagagcagcgcggcgtttcgctgcttatcgacattgagaacagtatcaaggcggcgcagagtaagggctatgaacagtgggcgaaaatccacaatctgaaacaggcagcaaagaccatgaatttcttgacggaacataagattgaacagtacgcggatttagtcagccggattgaagaaatggcagcggaaagcggacaggcggcagacgcattgaaggacgcggaaaagcggcttgcggacatggcggtgcttatcaagaatgtttccacctaccaaaagacaaagcccgtctatgacgcataccgcaaggcaaggaacagggagaagtaccgcgccggacaggaacaggcgattatcctacatgaagccgccgcaaggtcgctgaaagcggcgggcattgcaaagctcccgaaccttgccgcgctgcaatcggaatatgaagccctccaagcgcagaaagaagccctttatgccgactatgggaagctgaaaaagaaagtccgggaatacgatattatcaagcagaacattgacagcattttacaggcagacaggcagccggaacgggaaaagggaacagagcgcggataaggatagcaaaatccccgccgctgtgctatgatagggctatcaaaaagcagaggagcgttgagcatggaaaaccagaaaatgccggaatatgaaaccatacgcgccgccgttgccggggaaaaatgggcggtggagaaagtcgtggagtgctacaaggacgaaatcgacaggctatcgacggtagcggtcagacagccggacggaagcacgaaacaggaaatcaacgaagatatgcgccagtccatcacaaagaagctgatagaagccctcccgcagttcccgcttgaagaaatggaaaagggaaatgtcagataggcaaaaaaagaacagggcgcggaagccagtatatgacttccgcgccctgtctttttatgggtgctgttttcgtgaatgttacgcagtagaacgccatttttgggggtaaaggtataaagtatcgcctatccgattttcacgcccggaaagccctgtaaatcaagggattttccgcgcctactgcgtaacaggggcgcgtcttttcctcatgcgctcggcggcttgtctgcgggtgatacgtttccggcagacggggcagtatttgacactgttagaggttgacgcaaagaacgcgccgcactcggtacatttcttcttatcccctgtctggtaaagctccgcataaagcagcctgtcggcgggaagcaccgcaacccggaaccacttgcagagaagcgaataggaaatgagctgcggacatacgcactcgtccccgtcgtccagtaagatacagttcccgttatcataattgcagcacgtccggcgcacaagggcgttgactttccggctctggggcggcgtcagccgcttaaccccgttcatacttcatcagcggcgtaaatgggaagctctgcaaattccgcttcggtcaaagcgtccactttggaaagggtgcgctttgcaagctcccgcatatccgcgtccatgtagggcagcgcggcgttgacattctcaatcaaagcccgcttgccgccctcgttgtaaatgctcaaaaggtttgtttcttcaacagtcagtctaatcatgctcatacctccatatcgtgattttttgtttttgccgccgcctttttcggggcggtctttgccttgtctgctttaagctgcgcccggatagaggggcggggcttccttatctccctgtcccggttctcccccttgtcaatcagcgcatacgtcccatgtctgccctcgattttggaaaaggaaagggtcttgtagggcagcatggagaaaaggcggtcagtgtcctttgtggctgcaagccgcatgaacgccggggaaagctctgccatgaaatgggtcttgttcgggctgttcggctcgtaatgccgcttcatttcccgcacaatgcgccgcgcttccgtttcaatcagcccgtcccgcaaagcggcaatatgcgccttgaaatcccccggcgaaagctgctcccggctgcgccgttcttcctgtaagagcgattgcagcgcgtccgggtcgttgggtacggcttcaaagcgttcaaatttcccaagctgcgggtctggggttccgtcaaaatatctcccggcttcctgtaccctttccccatgctcataaatcagcttcaccgtatcggcgggcagctccttttccttgacgcgctcataatgtttagagtagtccagttcgtacagattgcccttgattttcccgcgctcctttcccgtcagctcgattgcataggcaagaacgcggtcgcttgtctgctccatgtagaaacgccatgtgttgtggggcgcggtgtctttgaggaaaacgtcgcgctcccggaaacagtgcgtcccggacgggcggcagaaccacaaaagtgttttgtcctccctgtgggggcttgccgccgcctttgcgataatctctttgtcaatgtctaagtcgctctggtaaaagcctgtgttctgcttcataatcgcttcaagggaagcaaacaaatccatgttttcaaatttgctctgttccggcatgggtcagctcctttccaagtcctgtgacttctgctttgcgtttttcttctgtgccttttccttgtcggctctaagctgcgcccggatagagggtttcttttccggtttcgctcccttgccgcgctccttgtcggctttgacagcgttagccaggtcaacaagggaaatctgctcgcccgcctttacctttgcttccagttcgtcaacggtgggggtgttgttgatgataccgtcaatcatgttcccgttctgctctgtggtctgctcggcggttttcaagggattgtcccgctgcgcctgttctgcggcaacggcaaacgcccgcgtcccattccccataatcagatactttccgtcgtccgactggtggtgaaagccatatccggcggcttctatctgctcccggctcatggcggtcacatggaaagtccccctcggtgtcttgacagtttcgcccgtttccaagtcgtccggggtaagctgcttttgctcctgtaaaaactccggcacttcccgaaaacctacactgtcaacgaaatgcgccgcgtcctgtccgtcctgatgaagcactaccacgtcggaaacggaaaggctgtgtcccttaaaatctttggggtggtcgatattgaaacaggtgtaaatatcttcaagggaagtttccggcgcaaggggcgcggaatagacaagctcatagttcgccctgtcaaccacatttcccgccgcctgcaggcggtcgtatggctcaaagcggaaatcccttgtttcgtccccgccctttatctggtaaatggaaaaggtgtctttgtcctgtccggcggtctgcgccgtttcctgtgcctttgcgtaaagctgcttcacgtcgccctcggtcagctcgccgcttttgagctgccccataagctcgcggcatttctccggcgttcccgtataaagcacgtcgcccattttcgcccgcccgttctcctgtgtcacataggcttgcaagaggtagctgttttcccggctgtcgctgtaagggttccggcgcactctgtaaatcgtttccggggtaaaggcttctttcggggctgcgcccgctttttcctgtgcgccggattttcccggtgcggctgcttccggatccggcttctccggcgcggcttcctgtccctctctggtgggctgctcctgtccggcggtctgctccttgtcctgtgccttttgcagctccgctaagttctcgtctatggaattgataatctcggcggctgcgctgcgtatcgtttcaagggagcttttcagctcggacagctcccgcccgctgctccacccggcgacatagccgaaagagtagtccgacgtgtcaagcccgtaatgttggcagacagtataggcgacgctttccgcttcgacttcgcgggtgcggcggtcaacgtggggctgctgctcgtcctttggcgcgttgaggtcaatgtcgtgcagcttcgcatgggcgatttcgtgaatagcggtctttaaggtctgtaattcgctcatgccctcgttgatagcaatgcgcttgtcctccaagtggtagtagccatgagagccgccctcgatattctcaaaggcgataggaacgggggaagtcttttcaagggctgcgaaaaaatccttgtagcggtcaacgtcgcctgtcagctcgtcaaccgcaatgtccggcagctcctttccctcggtctgggaaacgtcaaagacggataccaccttgtaggcgggtatggtgacttccttttcctcggtgacgggcttcccgtccttgccgataacgggcttctgcgtgtgcgggtcgattttctgcatttcctgtttgattttatagggtgacggagcaatgattttaattcccttttgccctttcatcacgtttcgttcaaagttgttcttccaagcggaaaagcccgccacaagggaagcgtccggcttctgcatggcgataaggacggtgtttcggaagctgtaattatggaattttgacatgactttcagatattcccggtaacgctcgctgtcaaagagttccgcaataccctgttccagacggtcggtaatctctttgagcttttcggcgggcttctcgctcgtcagcacgatagggataaccgggcgcggctcctgtggctgctctgcggtctgcgccgttctctgccccggcgcggctgcgtccatttctacctttgacgggtcgggtctttccggctgcgggggctgcggcgttacccggtattcctccggcacgtcgcgcccgtcgtaccattctgtaaaggtgttgcggttgttgtagatatagcccttttcggtaaacataccgtcgtcgttaatggaagcgtcccgcccgtattcctcatacatgaaatactttttcgcttcttcgggaagttccggttcttccagttcatcaaccagataacgcccgtattcttcttcattgtggacggacggataaatccagtagcagtcaaggttctgtgcaaggttgataatgtcctgtaagctgtcggcatggtcgccgtattcaatggctgcaatgaatttctcccggtcgtcgtcaaactgcatttccaagagcttccctaaatagttcagctcgtcggggtgggaatactcgcttaaatgctccgtcaagccggggatagtggattgaaattctgtgaaatgccattcctcatagtgcttgaagtcaatcccgatacggtcaaagacttctttcagatgttcggcagtcgtggggaatgtcacccattcgcccgcgggtctgccctcggtgtacttcccaagattggaaagatagccgcttaaaatcggttctgccatttgttcgctcctttctttttcaatcatgcggtgcataagctcaaaatcctcaatgctcatgctcccgtcaaatacataggggttaaaatcctccccgtcccggtagggcttttcggaaaagggaagccccgcttcatgggcggctgccctcgcttcctcgataacctccgggggaagcctgtcgtcatgcgctccgataaaaccgtcaatgtcgttcatgctgttttcgtagtggtaacgcactccggcggtcagctcgtcaaggctcatgtcctcgcctaaatgcccgcaatagtagccgtttaagataacggcggcggggtcaatgctttttatttcctctaaccggctcctgtcctccgggtagagcgtatcgtccatatcaagatgaaaatattccgcgttccatgaacgcccctgtttccagaacgccacccatgcgataccgtccctaagctcgtcttgatagtcctttacggtgtcccgtaaacttgccatagtgaaaaacctcctttctctgcggcagcgtcataagctgcattttttggctgcatggtctactacgggtacgcccgcatttctgccaaatatttttgaaaatttttagagggtgaagccctccgcaaaagagggtttgggaaacttcccaacaagcaaaatccccgtccggcgcgtcagcgtcgcaacggggatttacggaagtgggtacccgcttcctatgcttgctattcaagtttttagttcttctgcacttcgatacggtagttgacgtatttcccgccagtgtcagccagaacgatagttccgtcgtaggtcttgcctgttttcggggagtagagcttcttcacattcgccttgccggatttaaggagcgcggcggcaatcttcgcggaaaaagcggtcttgcgttcctcgaaaaagcggtcattcttccacatgacaaaggcacattctttgttgctgcaataatagtttttcttcccctcatggacgggggaaccgcaacgggggcatttgccgacagagggcttttcctcccggaacaaatcctttttcccgtccagtgctgcggcgtgtgtctgcacaagctcccgcgccatagcttcaatgccggacagaaattcgccggggtctgcggctccctttgctatctgcgtcagattgttttcccattctgcggtaagctgtggggaagtgagtatatccggcagaatacagataaggctgttcccgtttttggtagggataagctgcttccccttgcgctccgcaaagccgccctttaccagtttttcaatgacggcggcgcgggtggcgggagtgccaagcccccggcgttccgcgtccgggtcggtgtccccgttcccggcgcgttccatagccgacaaaaggcttgcttcgctgtggggcttcggcggcgttgtggtatgctccgttacttttgcggcggggttaggaaagccctgtccctcggaaagcttcggcagcgtcacgtctgcattttccccgtcctccgcttcgggcttatctttcagcgtcgcccggtatctgcgttgaagctctttccaaccctccgcaagtacggtctttccccttgcggtgaagtctgtcccggcgcatgagaaaaccgccgtaaccgcttcataaatatgcggctcggcggtggcaaaaagcagacgcgcccccgcaagggtaaggatattcttctcgctttccggcagcgcgtccgggtcagcctttgcaagctccatagtgggaatgattgcgtggtggtctgatacttttttactgtctaatacctttacaacctccggcgtgaagtccgcgcccgccataaaggggagtttttcgcaaagcagcgcgataatgcccgctgcggtgccgcccatgtcgtcagtaagaaagctgctgtccgtcctcggataagtaaggagccgcttttcataaagggattgtgcaaggtcaagggtctgcttcgcggtgtagccgaaaatgcggttcgcttcccgctgcaaagaggtaaggtcaaagagcttcggcggggctgcggttttcttctctctggtgagggaaacgcataccgccgtttccgcttcgcaagcccctttcagcgcgtcggcttctgccttgtcggaaatcctcccgcttgccgcttccgcgccggataaatcaaggcgcacatgataatatttttctttctggaaatgggagatagccgcgtcccggtcggtgagcatttttaaggtcggggtctggacgcgccccacgttcaaggtctttccatacaggcaggagaaaagccgggtggcgttaatgccgataagccagtcagcctttgcgcggcagagggcagacgcaaagagcgcgtcgtattcctgcccgtctttgagggaagcaaagcccgccttgattgccccgtcctccattgaggaaatccacaagcggcgcatgggcttcttgcagcccgccgcttcgtagacaaagcggaaaatcaattctccctcgcgccccgcgtcacacgcatttaccacttcggaaacgtcggcgcggtgcataagctcttttagggttttgaattgcttccccttgtccgggtcaacggcgtactgccattcctccggcagaatgggtaagctctcaaaactccattttttatattgctccccgtaggcggcagcttccgcaagctgtaccaaatgcccgacgcaccatgaaatgaggcagccgccgccctcgatatatccgtctttcttttccttaacgccaagcgcggcggcgatagtctgcgccacgctcggcttttctgcaataatcagtttcattttctgttctcctttcggttgttttaggtttgaaattggtttatactttaagcattactataagaaacaggtgacaatatgaaatcaatacatactttcgatgtttttgctcctactgatgaacaggaagaagcaatgaataaaaaacgtggcgggcattacaggcgcggtaaaaacaaagaaatggattactttattgagtgtgctacttcgctatttcccaacaaccattattcaaggttcacacctatatatgatacgacaaaagagttttatcaactgattacttcttccgatacaacagaaagagctatactaaattggatagcttctaatcgtgcatggaattatttgtttggcttattacggcattattacagaacaggacaccatgacgataattatatctttccagagttcaaaatcgggtcggcttatgtggctgattatctgctcataggtaatagttcagacggttatcaatttgtctttgtggaattagaagctcccaacgggcggataacaaaagaaaaaggtactcgtttcggggaagtaatcaataaagggattgaacaggttagggattggcaaatgtatattgctgcaaattggaatgtaattgtagcagaattggaaaagcactcattctccaatacaaagttacccagacaattatacaaatattgcccttatcaaatctactatgctgtgatagccggactccgtaaagattttgagaatattcgtgatagaaagctccaactgcaaaatgaaaataacataacacttttgcattacgaaaatctcatagatgttgcaaacgaaaattaaaagtccattttcagcgttccggctcacttgcctttttctcctgtacctgtttcagacagtagcccacacaagggagctgccctttgtacggacaggaagcgcaagccggggaatggggaacgggcggcgcattgtcacgccgcccgcccggtctttgtatcatcatcttttcaaagggattgtcggtaaacagggtcatgcttcctcgtcctcctgttcttcatcagaaagcccgtccccctcgtccggctcgtcctcgtcgtagtcgtcaaaatcgaaatcttcaaggtcggtgccgcccttgacgttttgcttcggcttcataaacttaaaataatagaacgcgcccccgccgccaagaagtgccacgacaaggaaaagcacaagcccgcccgcattgcctttctctttgggcagctccggcggttcctcggtttccggctctgcttccttgccgctgcaagcggtcatgttgtccttgcagacggggcagctcacatttacctttccggcttcgcatttttcggtgcaactgcaaacggcgggcggggctgcttcggtgcttccgtcctccataagtgctaagaggtcggcttcgtccacttgattaaggaaatgtacggtgttctcgccctcgtcgtcccggtcaatgaggatataaaagtaattgccgtttttggtcgttacggtgataagctgcttgttgccgccgaaatcgtctacaagggtcgcgttcccgtccggggtaaggggttcttccttttggggttcctcgtagacaacgccgctgtcgttggtgtcgtcctctccctccggggtctgtgcaaaagcggtgacggaaaagccgcccgaaagcataagggcggcgcaaagtgcggtcagtgttctaaggattttcttattcattctcggtgtcctccatttcttcggtgtcgtggtctgcgggttctgcggggtagcccggcgcggcttccatgcccggaataccgcccccggaaagcatagcggaaagctcatgcggggaaaggcgcatggagcgcacaagctgtacgatttgcaggttttccgcttcggttttctgcgcttcaagcccccttaatttattctggtactcggtgattttctcgcgggtctttgcaatctccttgtcgatacgttcaattttgttcatagccatcaataaatttctcctttcagattttcatttttttgttgtcagttccaattcattaagccgtagcccttgatacaggagtaattgacggggtagctctttatcttgcaggcgtcgccggaattgccctcgacggtatagacgcgctccccgtccgtcccgataacaagccctacatggtctgcgctcccgtccccgtcccagtcgaaaaagatagcgtcgccgggggcgatattctcatagcccctcgcgccccattgcccgcgtgactggaaccagggtacgccctgtgactggcacccggcaaagcgcggctcgcttttcccggcttgattgtagcaccatgaaacaaaacaggcgcaccattccacgcggctgttaaatccgtaccagctccaaaagggtcgcccgcctacgttgccgacttgccgcttcgcaaggtctacaacggcggtgttgccggggcgtgtgccgtttacaagctgtacgccgcttaaatcctcggacgcgcccatatcgggggagccgccgccgaaaatcagcggcttgtttccgcttgtttccagatagacgcggtacatttcaagctgctgtggcgttagaagttcctccgcaatctcggaaatgggcttgttcgtcagcttcacgttgaggatatggtactcgtagggtacttcctcgctggtcgtttcccctgtttccgggtctgtgcttgtttctgtgcggtagcggatttccgtttcttccgtcagcgtcaaagtgtactgcatggcaaagacgcggtttagttctgcctgtgcgctctgcggggtgtaggtctgtaaaagggcggtgaggtaggacgctaactcatgggggttatgcccgatactgtcaaggtcatagcggtattcgtcatagccggggtgggtgctttcgatattgtcaatctgctgctgaagctcgttttcctttgcggcgtaattattttccgtcgccacaaggtcgctgtcctccgacgtgtaggaagtcccaagtatgccgttcatcaagccggagaacatggagccgcaagaggaaagccccgccgataccatgatgaataagagcagcgcggcaacggcgatacatacgcccgccgggtgccgccctacaaaagcgattgccttttttgtttcctcggcggtcttttttgccgccttgcgggtgttctctgcggctttctgcgccgtttttgcgccgcctttccttgccgactttgcatactgccgcttgatttgctgcttctgcatgaagcgggaaaggggattgcccgcaatctgcggattgtcatgtagggatttatggtactggaaatccacattcgccttgaacgccgctttctctgcctttgccgccgcccggtagggtttgagcttgtggctgcggtagccctccttgactttccgcgtcccgtactttgcgccgcgctctgccagttcttcggatttgtgcgccccctcaacgccggaattgtccttttcaacggaatgtatcttgttgtggacgaaaatacccgcttcctgtgcggggcgggatagcgggttattgtggggcttattccttcctatgggcttttcctgttcctcaaaatgtaggcgggtcttgcctttcccggtggcttcatcaaaggtgcgctcccgtacaagtttcttttctttggggatagccgcctttgccgcgtccagacggtcggctgctttgtccgattttcggatatacctttcaagctccggcgttgcccgttcctcgtcggtaaactgcaagcgggaagatttttcttttgctgtggcttctgcctgtgctttcctcgccgcctttttgctcgcctttctggtacgcgccccgtcgatacgctccaagacgcgctcggctgcggcggtgtcctgttcccgttctgcccccggcgcatggggaagcggcggcgcggcggctgtgggcgcgggagctgcgccgcccggtatggtctgcgctgcctgttccggcggctgcggtgcttcggtctttgcaaagtccgcgtcccttatccgcttgctgatacgtttctttttcccggtggcggcgtttacctcgacagccccctcgcgggtcattttctgcgtgactttctcacgcgctcgatactgttttatttttctgtccctccaatccgcgcccttgcaagggcgcaatactcggcgtttatctcaatgcctatataatgcctgtcaagctgccttgcggctgctcccgtcgtgccgctgccgaaaaaggggtcaagcacaacgccgcctttcggacagcccgccttgatacaggtttcggcaagttttggcgggaacgcggcgaaatgcccgcccttgtagggtacggtattgataagccacacgtcccgcctgttccgcatggtcggcatgagggcttcgtcgtagtagctgccgcttctcgcccggttaagcccctgtactttcccctgtccgggtacttcgtccgcatatttctgtcccgcgctgcgcccggtgcggtaccgcgccgccgttgtgggggctaacggctcggctatggcggctgcgtcatagaaatatttctttgacttcgtaagcagaaagatatgttcatagcagcgggtagggcggtctttcacgctctccggcatggggttttctttctgccagataatgtcgctccgtaaataccacccgtcagcgcgtagggcaaaagctaaaagccaagggataccgattaagtccttttgtttgcagccggaaacgcggttgttttttgcaatctgctgtccgtttctgcctttcgggttcttcgggtctgcatggtagcccttgttccctgtgccgcagtaggtgtccgcgatattcagccagagcgtaccgtcagaacgcagtacccggcgcagctcgcggaaaacctcggtcagcctgtcaatgtactgctccggcgtgtcctcccgcccaatctgcatatcaagcccataatccctaagcgcatagtagggcgggcttgtgacgcaacagtgtacgctttcctctggaagctcccgcaaggcatagagcgcgtcccggttgatgatggtgtcagttttcagcccgttcatgcttcgcccacttcctccggcttcgtcgtcattacccggtaaagctcggtgtctttcgggaagcggtctacaaagggcagcaccacgttcccgtagaagataagcccctcgcccgcttcggtgtgggtgacatatttcatctgctgcggggagatgttgagctgcttcgcaaggatagcccggtcgcacgccgcctgattgagcatgaggacaaaatcagagttttcaaagatattctccacttcgcgggaagcaagcaaatccttgacattctgcgtaatggctgtgggtatgccgccccattttctgaaacgcttccagatttcaacggaataggcggcggtctgttcctctttcaagagaagatgaaattcgtccataaaataccgggtggatttcctttctgcccggttgacggtgacgcggttccatacctggtcctgcacaatgagcatacctaactttttgagctgcttcccaagctgcttgatgtcaaagcagacaaggcggttgttcagctccacgttggtacggtggttgaatacgttaaggctcccggaaacatacagctccaacgccgccgcaatacgcgccgcttccggctccggctgcttcaaaagctcgttgtagaggtcgcccaagataggcattttctccgggtcggggtctgcaaggaaagggcggtacacgttcctaacggcgcggtcaatgacggtcttatcgacgggctgcaagccctccttgccgcctatgacaagctcgcagagggagaggataaagtcggatttcagcgcaagggggctgtcgtcctcgctgtaattgaggttaatatccatagggttcacatactggggcttcccgtcaatgcccttgcccgtaggggataagcgtatcacttgcccgtcaagccgctgcacaagggaaaaatactctgcttccgggtcgcagataattatgtcgtcgtcggtaatgaggaaagcgtttgtcatttcccgtttggcggcaaaggatttcccgcttcccggcgtacccaagattaagccgttggggttctttagctgcttgcggtcgcagagtatcatgttgttactaagggcgtttaagccgtagtacaaagccgcgcccgtctggaaaagctcctgtgtgataaaggggataaagatagcggtgcttgacgtggtaagccctctttgaatggggataaggttctccccaagcggtacagaggacataagccccgcttcctgttggtagtcaaggcgggttaaggcgcagttgttcttctgtgcaatgcccgccgccgcgaatacgtcattttccagtttccgcttcgtgtccgccatgttcaccacaaggaacgtcaagaggaacattctttcattccggctctgcaagtcctgtaagagattcttcgcttcgctgccgaaagtggcaaggtcggacggtataatatccatgtcatagccgctgcgtaccgctttcttctgttcctcgattttcattttgtcaaggtcggtaatcttgcgcttgattgtctttatggcttcggtctggtcgatactgtggatatgcagattgacgataacgcccgtttccaagtccagaatgtcagataagatacggtcgtttaattccggcgcaaggatttcaaggaatgaaaccgcgccgattttgcgccccatgcggaaataacgcccctcgccaaaacggaaagaggacggggcgataaagtcctttgtggaaagcccggacggggcaagccatgaaaaatcaaaggcaaactgcccgccctccgggtggaaaatgccatgcagcattttaaggcgttcatagcctgtcatggggcgggcagacacgcccaagagcttaaagttgttgagtacgtccgtttcgatacgggcaaggcgggatttcgccgcgcccagactgtcggcttcaatggcaaaggtgatatattttgctttgacaagcccgttgttgccctttgcaagctggtttttcagcatatcccggtattctgtgcggatagaattgaaagcgtcctcctgtgccgggatattgaccgccttttccgcttcgccgcgctgcgtcccttgattgatgaaagaaagctgcaccgaaacggaagcgtcaaagtagttgaggaagtcgcaccagttctcaaaaatggcggtcttgtcgtctgcctgtgcaagctgatagttaatatcttcaaaggcgacggtctttgagtatttccgtcccgtaaccttgcagataccgtccgggtacatctggatataggggattgtctgctgcgcggtgtgggctttcccgtcgccctttgcctgtctgatgatttccgcaatctgctttttctcggcgcgggtgagcttgcggggcgggttaggctttgtgcttcccgccgcgctgtttcttcgtgtttccttttgcaatcgctgatacctccttttcaagttttctctgccgttctaagacggaataaaagttgtctgtcctgtatggtcgttctttgggggctatgaattttgtccgtatgatgttcttcaccaccacttcaaggggctgtccatgcttctcatacatggcaaagaggaaacagggcagcatgacggcaatcatagccatagacgcaaggcttgtgcctgtgctgtctttgagcagaaagaaaagcggcaagccgaacaggagagccgccgcaaaacatacaatctgccgtttggtaaggttgaaagctacttttgtcttgactttggataagtctttgggtacgggtacatacgccaagtgaaaacctcctttctctgggtttggtgttgctgtaattttccataagggtaatcaaggcaaaggtcaatctatgccctttgcccgcccgtattatatgggggttatccgcgtcaaggtcgggtcgtattttcgccgcttcgctctgaaaatctccaccctgcccttgacacgccgctaatgcgcggagaatatcgacttcgccagtgcgccggatttgaacagggagaaacagaggataacggtataggctgcaagggagaatatcgcgctgtgcagattgtccgctattatcatgttgtttaccagaaccgcgtaaatgccgacgcatatcataatgaggaagccttgaaaaccgatagcgaacagggattttaggtagttgtttcctatctgcccccattcccggttcgtcatagttgcaaacgggataggcgataccgaacagtaaaggtaaatttctatcatgcgcccgtagaggataacggttatcagtacggacatgattttcatgcacaagctcacaaggcttgtttccatgacaagtaagagcagttcggggatttccatagcgtcaagcccgctctgcatggaagcaagggcggcggcaacatcaatctctgtgctgccgccgattacccccgccgcgccggaaacaacgtgctgcgccatatcgaacaccgccatagtaatgtcaaaggtgtgcgtcacaaggtagactgccacaaacgccttgaacacccacttgaagaacatggaagtgtcaacgtcgtgcatattgttcttttccgttaccatgctgataagctcatagcataggacgtaggtaatgacaagccccgcaatgggtacgattacattttcactaagggtctgtatcatggagaatatatttgcgttccacccttgcggggtctgccctacctctgcggcgatagtgccgactttttcgtttacgtccccgaacatagttgacagattaccgtttatggctcctatgaggatttcctttatccattcgttaatcgcgtcaagtatgctctgcataagcctttacccgcgcttcttaaccgaacaagccggaaagcagcggtacaagggtcatgccgataagggcaacgccgccgcccgccataagctgcttcatgccctggctctttgcgcccggattgtcattgccgtagccctccatcagattgattacgccccagataccaagcccggctccaagtgctacaacaagggtctgcaaaacgtctactgcgctattgaaaaatgccataaatatatcctttctgccgcgtctgcggctgtccggcaagcggacaaaaggcggtcagcgtatggtcgccgccgcacaaaaaaaccgccctctggtaaaggcggctgtccccgcgctgcgtaagttctgcggcgcggcggtattcagttgtaaggggtgcggctcctgccgctgtgtactgcgccggaaagtgggggcgcgtatcatgtagccggtatggatagatgtgattgcttcaatcgctcctttctgtgttccgctgtgctgccggacgtttttttcagacttgcgggaagtgaatagcttgcgtagcaaggtgttcgcttcccgcaagttcacaaaggggtagctgccgcaaggcagcgtaggggaagtgtagcttcccctgtcccccggcggtctgccatgctgtcactgttgcgggataagcccccggcgcgtgacatactccgttgcaaaacggcggtgttccgcttccttttcccgccaatactcccataatgcagcgtcggcggcttccgcaacattcattaaaaaccgttcaagctgcttttgtttttcctctgcgctacgtttcctcatggtctgcgtcctcctgtaagtctgccgcgtcaagctcgtaatagtcaaaaacctcgtcgggcttgacaatggcggggcggcgtttaaggtgcttttccatgtcaaaggcgttcttcgggtctgcgtcggacaggtacttgtatttcgggtgcttcgttatgtcgaatttgtccgaaaagaacgggcgcaccccgcgtagctgcaagatacatttccctccgtccatgactgcaatttcatcttccgtcataagctgctttcccaatttctgatagttcagcccatgcgaaagctcccgcccccttgtttcggacgtgttaaagctgtctatcgtttcttttcctaaaatttccgatatttctttaagggtggttttctccttgccgcccaagaaaagcgtggtgtcgcagttgccgactatggtatcggcgttgtctttgtaaatggcttttagctgtgactggctctgcaagatgattgacgcggatatttcccggctccgtatcgttgcaatgagcttttcaaactttggtatctgcccgatattcgcaaattcatcaagtaagcacctaacatggacgggaagccgcccgccgtattcatcatctgccttgtcacaaagcaagttgaatagctgtgtgtaaaggattgaaacgacaaagttaaaagtgtcgtcggtgtcgctgatgatgacgaaaagggcggtctttctgtcgcctatggtgtcaagctccatttcgtcggtttccataagctcccgcagctccttaaatagcgataggtaatcctttgatgttatctccggattttcccccgccctaaaccgggcatgaacctttcagctcacccggcttgccatcaggaacagaatttatttcatctcaataactctcaacgtggacaaggcttcttaacttattgagtttttctttctgcttttggtcaaggcctaggatttccatatactttctgataatatcagggtttgtagcatgaatcaggtgatgtacatcttcacataccaacaccagattttgataattgtccttgccgcctaaataccgtggcactttgtgatggcaatgaatatcgccaatagaaagcactttgccagatacggcgcattttcccatttgggccgaatacagtgaaagcctgttatcgttgtattcgatagtacggtacagaaccgggttcctcattaagtaatgaagaaccgtcatgtcgattctgtccagattcttatggatttcggctctgccctcgggcatataggaattgattttgcggttcatggactttgggggcttgtgccgtatgtagccaatcgggacaactgcgtgtccggctacatatcggagctgtttgcttttcccataccgttccctgataactttcggaacttcacacggaatcttcctttttctgacctgttttgcagttttaacccgttctttcagtcttgcccgcaggctcttgtggacagataaggcgaatggcgtaaggtcatcgcagacctttgtggctaattgatagtagtcatggattcccattacataaacgttgtagcggcaaatcgcctgatattcagtacgtttgccttgtgacgggaactcaatgtcgtaaatcagccgttttaagtttggttttattttcgcaatagatttctctctgatatggctctctactacatatttggcgcgtccgttgctccgtttcccacgggggataacctttaacttgaaaccaagaaactctgaatactgctctttcaggttaatcaccttcgatttttcaggactgatttcaagagaaagcctttcatggagccagcttttggttgcgtggaataacttcaccgcattttgatagctgttcgtgaatatcttaaaatcatcagcgtatcggacgcaggtgacttctttcagccttgtcctccgcagtgcggcaaatttatggctcttgctcacgcttccgttgtaattgaccgattccttgtaagggaactccgttggtatttcttcccattggctggcaagccaccaatccaattcgtttagaactacattggatagcaggggagagataatacctccctgcggcgtacccacctccgggaatcctatcccggccacctccgcttttagcatagctgatataatactaagcagcttcttgtcttggattcccattgtccagagctgtttcagcagttttccgtggttcacgttgtcaaagaaccccttaacatctatgtctacgacatagtggagattgcttctctgcatatttttgtgaacctgggcgattgcgtgctgttggtttcggttagggcggaatccataactgtggtcgtggaatttcgcctcacatatcggctccatgacctgcaatacgcactgttgtatcagcctgtccataatcgtcggtattccgagcgggcgcttcttcattgggtcatttcctttcggaatttctacccgccggacgctttgtgggacataccagtttaatttgcgctgtatggcgcatataagctgttcatcagagagtgctgataattctgtgattgtttttccatctgtgccgggcgtcgtactcccgtggttcttcttgatgttgcggtatgccagccgtatgttttcgggtaatgcaatgatttcaaccagatgtttgaaaactttgcctttattgctgtcggcatacagcttatcttgaattgcctggaagtcataatactcggcgtgccttaacttatctttcttctttgcctttcctgttgccatagtcggttacttatccccactttcgtttggattttcgcctttcttagtcctactcgaacctatgcgtgtttattgaatatgattttgtttctgttcctgactacagcccgtccctccaccgcttactttgttcacggcttcacaggtagcatggctgctctttcctcccggattaagaacggttataccgcacctcccataaaaggcggcacgattttcccgcccattgcttcatcatgcgtatccactccacatccggggctttccacgttccgatattcctatctttgcataatacccttaaccctgccctttaggcctgtatgcctgatggtgcctgtaacaccatagggaatttcatatcgacaaatcttactttaccccacatacgccgttttcacggctatggcatttctgccatatcccgttatagacctgtacattcgggcttttgtcagcggtagtcagccgcattctggacataggtactttatagacctccggcctaacacccccggccacctctggctcggctttgctttatcccccaaaggggacagtcgcgggtgcagacagccgacttcagcgtgctgtgtcagtcgcgggaaatacgtcccgtttcttccaacgcagtatcaagggaagcgtttcagggcgttaccccgccattccacttctcggaatatcagttagaaaggctatagcctttccgtcacttttacctctttgcaggaaaatcccacgcagagtttatatgcgacaacgtgtcgctgcactgtctcattcagtttttaaagtcaattatcagtcgatattcttaaatatacgtatatagcgttgtttgttccaggttcaaatcctgtcacctcgaccataccgagtgtccttattggacttgaaccaataaggacattctttttttgtgttcatacggcaagcgcagcatactgaacatttacgccctgacgtgtatgtactgatacgttattttcaggtaatttacttaaatcaggtatttcaatagctccgatacagttataatgaattttaagccgctgtacctttttaccgtctattttttcagcctgatatacttctatcttgtcaatcaattcgtttaacattctcggtgtcagtttccttgcccttgtatatttacgaacagaagataaaaacatatcgcttgtaacagctctattctgttcattatcaagctccgcttgaagttcattgatttttacttcattttctttttgttctgtttcatattttacagacaattttgaaaatctgtcgtcgcttatgcgtccaagagtgttatcctcataaattttttcaaaaagtaagtcaagctctttatcacgcgcaagcaaggagttaagttccttttgtttggagcgtcgttcctgctctgccgttttaatcgaatttcccataacaattttagcaaattcattttcatatagagtggcaaatttcattaagcgtttgatttcaccgagtacaacctgctctaaaaaatcagtacggatataatgtgttgaggtacatatttttctgctgcccctgttatatcccatacaattaaaataggttatatcgtgattagcctgattgaaatgataaccgagtttgcttccgcagtccgcgcataccagcaatctcgaaaacatattcttatcttcgcctgttactggctttttgcgtgttcgtctgcttcggcgttcctgtatcttttcccaaacggtacggtctataattggttcgtgaatatctttaaatatcgcccaattctctttgtcattctcataacgctttttatttttgtatgacttagaataggttttaaagtttatcacatcaccgcaatactcctgtttggaaagtatattgataattgttgagtggtgccatttataaggatattcctgagagcttttcaagcccggacggcttatccctttactataccaatagtttacaggagtaaggattttttcttcctccagcctgcaagcgatttggtctgtacctaaaccgccaagcgccatatcataaatatgtttgactacctttgcggcttcttcatcaacaatccaattctttccgtcaggatttctgatatatccatacgggggaagtccgagcggttcgcccgcattaccctttatcttgttactgatacggcgtttttttgaaatatcgcgcgcataccattcattaaaaagattttttattggcgcaagctcattttcgccctcttgtgtatctatattatcagaaacagcaacaagccgtatatcatattcagggaaaaattcttccgtaagtctgccgacctcaatataattacgtcccaatcttgaaaggtcttttacaaagacggctgaaattttattgttttctatcgcttcaatcatagctttatatccgggacgttccattgtaacgcccgaaataccgtcgtcgcaaaatatcaataaatttgtatagcctttttcctttgcaattttggttagtaatttcttttggttgcctatactgtaactatcgccctctaagttatcatcacggcttaaacgaacatataaagccgctgtcatttctttttgtttgttatttgaccgcttcattatttcctcctttcagacagtcaaataaacagtattacatttatattataccgcgcttttaaccgtctgtcagcctgttttaaaaattttattcgcttgatgtcataagccgtaataaaacagagcctaatgtttcgaaagatttctctttgaatatcggttgtacaacaaatgaggttccattgacttgatatgtaatttcagcgtcaagggattttttattacaaatatttttgtgttctaagttttgagtagtgtcattcataaatagtgaacctccataaatattttatgttaaatccacctaccgagagtaataacccaatcactcaaacaatcatcaaactactgatagctaatcagtatcacgggaatttcacccctgcacggttctcgtccagccacccaatgcagtgacgcgttcaaggcgggagtatcattatacttttcgtcaatcgtggccgtatcggttgcaagccgatagttattgacggtcttatcgctaaaatgtaaaacgtccgtactcggcatactgtttgtatggtagaagctgttacattcattacggcgagccgccggctcctgctcggaaagaaagtatttgatgattggattattcagttgtcaaagaacaaaggggattttagcccatataagcgcattagagatataatgcgtttatatcggataaatcgtgtactttacggagtgcttaaagcaccccgcattattttaagacaagattttaaacttttttataatactataaattagtttactttcaagtcttgaacgcatatcatcatctacatacatatattcattattattttcatcacgggcaactctcgtagacaaacgaattatgtaatttctataatgagcaagtatgtaatcaatggcttctatgtcttcatttattgctttttcgattattgaaaaaggaatgtctgataaagtttttttcacttaatgccctccgtactgataattgcctttaatcgttttaatgcgcgtatgcgcgcccgaaaaacaatccaatagcttaaatcaagctgttttgctatttctatatcaggcatatttgcaaagtatgatagtaaaacaatatctcttaaatcacaaggaagtttgtttatagcttctgccaacatattgttagatactatgatacgaatatcacatacattgaaaacattatcggttacaaaatagcaatcaaatgtatataattctgcctgttccttgtcacttaggaaactaaaatccatttccaaatctgcatagtgtttatattcagctcttatattgtttgcttcattttttaggacgctgcaacaaaaggaacaaaattgttttgatatgcgctgcttgtcctgttctgaaaattctctcatagttttaactcctaacaccgaaaactgattttttatccctcatatggggaacaaataattagataaatttctgcttgttttcagaaaaaacatttaataaaaattctctgtattttagcaaaaagtttgtaagaaaaatcaagcatatcgggcggaggtcttataaaaaaacatatcattttatttatcgaaacaaaaagatataattcatacacttttgatataataaaacaaaaaaacgatttataatattgaatgaacgatttttcgtaaagatacccaaaaaaattttgatatatatttagcattgccgtataaaaagaaaaaagcataatactatctgtcataaatacacataatattacgctttctatattatttagtcttaaacggtcatttttcgcattagaaactaaaaaagccgaacctatcaaacaaatttttttgacaagtccgactttttattagtccctataatcctataatagcgcataaatttttgacaatccacacattgtggctgtacgctgttcactccttattacaaaaacattataaaagtaaccatattgtaccatattatattgattttgtaaataagttattctgtataagaaaaatattgaggttttatcctcaaagtattttaaagtccagaaacaaaattacttatagtgtatgtatctctatctttatgaactaatatataacaagctcctttgttattcccattattattacttgcgttaggagtaaactccacattatcgaaagtgcaattaaaaatcaatgtatcagtagaccaatctgaactttcttctatatactcaattcccgataatgtggctgatttcataccatatacaccattagaaatatcatattgagaaaatggctcgctaagaacttttttcatttcagtataattattttctgcaaaatcatcaaaaaatgttttaattacatcttgagctttcataacttcttgataggaaaatggttggcagatttcaacggtttttgtttcgtcattccaatccacacgttttccaaaggcctgtgaaatagctctaatagggacatatgttgtaccctcatatatgaatggttcaacaatatttccgtccgtatctttcggaatgcactcttgtccgaaaactgatattttaatgttattatacgcaatctctattgtgtcatttatctgttttgcatatattgtgcccgtcgatataactataccaattattaaacctaaaattacctttttcataaaaacctctctttctttacttataacttatcataaaattaaaaattctttataatatagaatgaatatccgccattgatattagcctgagtaaatggttggtctttacaatttgttgtgtgcgctgtatatgcaagtgttacagtgtcattaagagttaccaatacaatatgtccttgtcccgccgtagtataagcgaaatttccagcattagtttcccaagcgtcctcttttgttgcatatccatactgcaacatattattttttaaagacgctgcgtttatccacgcaacagagtcagggctccagccaccgtgaataggcactccaccagcatatacgcactgagaaacaaagtttgcacaatcaccgcccttacctacataattattatatgccggattataattacttgtgtacgggccccaccatttccgagcataatcacgggctgctattctgttataattactccaattatcaacatttttcataggttcaactgttgagctgatttcctctatggttgctgttaattcttctgcgcctgattggtacattgtttcatatgttggaagtaagtattcatctgtgctgactatattacccaagctatctatacaattaagctgtatattatcttttgtaattgctgtctgcggatttattgaaacataaaaatccatacttatttctgtttcttcgccgatatactcatttactgcgtctactctgtcgcttattacttttaaaacgcgttctgcatttaatactgttgcattttcatttaatacagatgaaacatctgtacttttttgaatatccgcatatgatgatatgcccgccgcattcaaataaccctgaatatatggtaattcttcaacgtcagaagcctttaacttctgtctaatagtagcggttgtttcaaacgaaactttattatcggattcatattttatatcaccgtcattaaatgatacgtctgatatagtataatattcttcaccgcgttctacaatataatcatatattgcgtcctttgctgtgtcgataaaaagctgttcgtcaatcgttgtattattctcggcaaatgtcggaatactcatagctgaaactgacataatagcagctaaagctattgttattaaatttttgattttcatagtaaaacattcctttctcttaacttatcttgttattattgttcatatgcagcgtcataaaaaatgtttatagtatctctgtcgcttgtagcggtacagcttgcattatctctgtcatatgtcagtcaccacctgaaagtattttaattgataacatattaaatacagttgttactattgattattaaactgatttaataaagtttttaattcattttgtattccatcacatataacaaattcacaaattataacacctttttcatcttttattccgtgaagttctctaataggaatattgatagtattataaattatttttgcagcttgttcacgagtaataaattgtgttgcatctaattcaatgccttcagaaatattcaaatcttttgccttttcaacataaggtttataccatataacatctgtatatgacttgtcatatcctgttatttcaacacatatttttaagatttcaccaaaagatattgggtcatcaggacgaaatataccatacccatcacctgtcataatatttctcgaagatacctgtgttatattagaatatgcccaatgtgttggttgtacatcttgaaaaatggttatattgtttatatcatattctattttacctaataaatttgtgattatagtcgccatttctgctcttgtcaatgttttagtcggattgaatttattatcatcattaccaaccataatattatatgatattaaagtatctatttcttttttgtaattaacatattctatatcattataatctgccaacactgataaagtatgactacaacatatacttatcaacaatataaatgtatatatttttttcataattatttgctcctatcaaaagaatggttatatgaaatttttgattgtatgaaataaagatggggattataccccgtctttataatgcttagttatatacacctgtataaaccgtagctttcgctgttcccggtgaagaatatgtgctaacatagaaggcatatctgtaattactgctaatttttacttgatttccgtgttccataaatgaattgttaactaaaattaccgttaaaccgttattttgaatgtttatttcagtcgtataagagtcggaatttagtgattcatttctaagtcttacatttacactttcaacctgagactgtatatcttctaagcatagtgcaactgcattagaaccgctcgccggatagaaataccttccaatagcccaattagaagaatcagcgtgaggaattgtaccctctcttctatttagaggtactctatttatctttaatcaggcttgcgtgcgtagatttaagattgagggtatctcttgttttatgtctaacataaaatcagcattatatttgttttttttgtttttgaaactttgcattatccatacagaaaatccataagaccgtcctatgccgatacgcgtatcattttgccggcttgatatatgcttttctgcaacatcaaaatatcgggtttgcccctatgtgataagctcactaaactaacattgagaaatagcatttatcgcgcatattcagattttacaaactgtccgtatcagacaatgcaccgtttcgtatgtactcaatccctgtttataaatcataaacaatttaccatatatcccatagtattgaatactatattgtgattggttgtgaggggatatataataagctgttttgcttatatctgcattatacggcaggaaaattttgatgtcaatagcttttgcctaagcggtcgtatatttgccccagcggttaaaatttgacaaaaaattacccttatccttttttggataagggtaattcttaattgtgttttcgtacagttaaatacattttaccggctataacaaacacagcaacacttataatactaagcgatatgattttagataatataagctgacgaaagactatggctgttacactccagcataccgcacttatgattattaaaattctcgccgttattccgaatatccgctgttctttttcgtcaagcggcttgttcgccgcttcaacaggtgaaagaatagaaagtattatcagcgctgttaaggtaagcaagccccatacggtcatactgtacggaacataccttacaactgccaatacaaccggacacataatgcaagatgataaataacatttcagcgatgttgagaaatgataccctccgcaatatttacgcaagattttatatacgagccagaataaaatacattcccatatcatacccatagcaagtcctataattatcatagtaatatctgtaatcaatatatttaagataatttcaagggcatatacatattcgtcatattgttcctgttttatgtagttattgaggattgcatacataattgctttctctgaaattttatgtatcatagcttaaaactttctgtacttttttatgctgttcggcggcgtcggctgaccgtttacaatacagcaggttgagtttgtgtgaaaaagaagaaatgcaggtacaataacaggcaatgccttgattgcaaatgacgctcctttttgacacaacttttttactctacttaatagcatagtaaattcctccttctcttttgatgaaattattttagcaaataatgttatttaagtcaacccaaattgcctaagcggtcgtatatttgcctaagcggttaaattttgtattattatcgttgtggaaaatatcttttgttctttgttatatttccaatccaaagaaccattataagctgataatgctctgctgatactgttcattcctataccgtgcagcttcgcattatccttgtgagtttttagtctgccgtttattacaataggctctatatctgatgtattttctatctttataactataaaattttgattttcagtatgtatattcaaataaatttttttctctgatgaatgggcgcagctttccatagcattatttattaaattagaaaatatagttacaatatccatatcgttaaaaaacgacagctcggctcgtatgggatctatcaaaaattgtatattttgattttcacattcttctttcttcttagataaaagcacatttaagattttattatctgaatattcaataaatttaggctgagaaaatttgccgcaaatagattttatatattcctgagcggtttcattatcagctccgattaaagagcttaaagcacctatatgttctttgaaatcgtgattaagtattgaggcttgctgattattttcttttaacatcatatattcgtcataatcaaatttttcttttaattgctgagcttccaactctgctttctctgtttccattatcatcaatttttgatttattgcaaaaataataatattcattattattagtatgaagcacaccaatgacaataagtgtgatgttgtattgactttcatcacaagcataattataataacagtcaaaataggaatagataaaagtccaagagaggtagcttgtacatttttctgttttttgcagaatacgcggcttattatcattattccaattaaatataagagtttgcttgcaaatgtcaatataagcgactgtgaagatgtcattgctatggtattgtcaggtataattctaatatatggaataaatataactaaaaattcacacgccgaagttatagccgcgagtaaaatactttgaaacaatgcgcttttccagctaatgcgataacatacgccaaaaataacaaggtgtattacaacaaaagttaaagtatttacaactatctttccgcgtgcacatataaacaaatcagcaatataaactaatgcaattattgcataacaaagatacttatttctttttctgtaaaataaagtgtcagcataataaataaaaattatatattcaaatattattgctaataccattcctaaatcaatccgcattatttttctccaatccatttagcaaagtttttttgaaaatcctcttgcttacgccgcgacaaatatatttcatattctgtctccctatatccgcaatagattttatctttgccatatctttttatataactgaaatttatacaatatcccctaaaaggctcaaaaaaatttgtgtaatcttttacttgttcaaaaaccgtctgatacggaatacttacaataatttcacctttggtcgttataatatgtgttttcttgttttgaacatatatgtaaataatattactgataaatatttgtatgttttccgaatttaccattacattgatgaattgattatttttgtatagctcctgtatagctgagtcaatttcatagaccaagcggcgcctgtctattggttttgtccaaaatctgaacggtcgcacattagacgcattatcaaaatatgcttcgtaattggttacaaaaaagaataaacagcttttatttgttatacttattttttcagctaaactaataccgtccatttcagccatttcaatgtctaaaaatataatatcatagacagtgtcggactgtaacaacttttgcggtgaactaaaaatgtcgattgagtgttttattttcttttcatttaaaacatcttttataagccttaactcattatttaaggctattttatcatcatcacataaagctatacacagtgtcattatttcatctcactttcaatgtaaattaaaaatatttttcagtaaattcgtaatatctttatgtatattacaacacaatcacaataaataaattttattataaaagctataaattgtcaagatttttacactgttttgctatattttcattaaagatgtgcagaaaaacttatttttatttgttacccatatataaggggtttttgctaccagcaagcaaagccgccgggtacccgaacggcgattttttgtttgtctatgccttgcaaaagtcacaaaaaatattttgggaacaaatcccaaacccagataaaaaacggaggtaaatatatggaaaagcgaaaaagaaatattcaaatcaaattcagagtaacagaagaagaaaaacagttaattgagcagaaaatggcgcagctaccgacacgacagataggcgcgtatttacggaaaatggcgattgacggtttaattatttatactgacacaaccaacattaaggaaatgaacaaggaattacattctatcggcgttaatataaatcaaattgcaaagcgcgtaaatgaaactggctccatttatgaggaagatataaaggaaattcaagaaaggttaaataaaatatggcaattacaacgaaccatactattgacactaccctaagaaaagccattgactatattttaaatcccgataagacagacgcaaagctgcttgttcacgcatacgcctgtactcctgaaattgcagatattgaatttgattgcacaagagaacacgcatataataagggagaacatctcgcgcgtcatatcatacaggcattttcgccgggtgaaaccacacccgaacaggctcacgaaatcggaaagcgtttcgctgatgaactgctgggcggtaaatttgaatacattttgacaacgcatattgacaagggacatattcataatcatataatttgtaatgacgtcagttttgttgattacaagcatatccacatcaatgaaaagtggtataaccattcacgccgcataaatgacagactatgcaaggaatacggattatccgttgtcgaaccaaacgctgaaaggaaaaataaaaataccaagtatgagaataaaccgacaagctggagggcgaaactgaaaaccgagattgacaagataattccgcaagtaaaagattttgaggattttttgcgtcttatggaattacagggctatgagataaaacgaggtcaatatatatctgtccgcgccaaagggcaggaacggtttatacgtctgaaagctcaaacgctgggcgaaagatacagtgttgagggaattacaaaacggattgaaaaatcgcgcaaacgcaagccgattattcgtgataaccgtatcagccttattattgatattcagaattgcattaaggcgcaagaaagcaagggctacgagcattgggctaaaatcaataatcttaaacaggcttcaaagacgcttaattatttgaccgagcataatataaacagctattcggaattggaaagccgtattgatgaaacgtgcaaacagtttgacgataccgccgacaagttcaaatcagttgaacggaatttgaacgacataaatattttacgaaagcatataagcacatataaggcgctccgtcctgtatatgataaatatgtcaagtcgaataacaaggcaaagtttgaaaaggaacaccaacgggaaattattttatttaaggcttctcataaatatttatcgcaggagcagaccgatagaaaattaccgacgcttgaaagcgtaaatgttcagcgtatggaattagaggagcagcggcagaaattatataccgattacagaaaagcgaaaaaagaggtgtccgaaattgatattgtaaaagctaatgttgacgctatgctgcacactccgcaaaggagcgaaccgacaagagaaaatcagatagaatagtcattcggcgttttatacaggctgatgttaaaaccttgtgcgcttttccggctgggcgcggcatatagtaagtgatataattagtatagagaaaatatattttaatttcaggaggttttcactatgaaaaagaaaattattacactaacactaatcgctgcattatcagcgacagcgacaacagcgtttgccgccccgattccaagagaaagcgcgccgcttaatgcgacagaagcacaaatccaaatcactgaaaatattgtaggtgatattcttgatgaagtgcagacgggcaagctcggttacacattagctgccggatatgctaatacaaaaatccgcaaggctgtaatggcaaatcagacagacggtaacggttacggtatcttatcgccaatcgcgcagaacgcaatccgcgttatgagggataaacagttaagacctgacgcatacgcaaaagcggaggaagaattaaaggtattgattgcagatgtgattacagcggttcagaacggtatggatattgacactgcaacaaaaacggcttatgagaaaatctatcaatcagcagacacgtcatttaattatgacgagcaattttcacttgatacctgttatcgagatattcccgctgtcggaatggaaatgtttacagtcgcaaggaaattgttattggaggctgccgtaaaatgaaaattgaagaaatagataattgtgatgatttagacgatataaaggttttcgcaatattggttactgatgttccaagcaaatatgtagcccaagcaaagaaaatagacggaaagtattataaagaggattgttttggaatagagatttcatatcacgctgacgaggacaaatatgttatatcgtccgaatatgataaacaactgtattatgtggattttaacggtaattggcattggttggattatacttttacacaagcagaaaaagacgcagcaatagagttatgcaaaaaggatttacaaaaggaagcataaccaaagcggttatgcttcctttttctctttgactatataatattcttttctaacaactcggtaacttctcttacgctacgtccttgtgaatgtatggcattgagcaaattttggatttcttcgtttgttggcttttgtacactattcttcgttttaggagtatggtcatttatatatttttgaataagtaatactaattcgttaatcccaatttcacccaaattctttattccccatatttgcggcaaagtcaaatttagtagtttttctaaatcaataatatttttaaatcgtataatagcagacacgactcttgcagacaaacaaagttgtgagagcggaatgtttttgtagatttcggattttacattaaaaatttctgctaatgtataatcagatgttttatatttattcgttaattcttttatgttttgtttatcttgttctgataatttttgatatagggtagattttaaatccatatgtaacaactcttttcattaaataaaattgcataataaaagtgcgtcgcttcaatagaggcaacgcacaaaaaatgcgatactctattgtctgcgaaaacaatttttatactttccaatatacgttgtaacatatggcacaaagtattaaaaagagtacgcatttttatcatatgataaaaatgtttttcttcgtgccaaaaaaaattgtatgcaaaaaaagctataaatataaaaattgttttcgcatttataaatatatcataaattactattattgtaaatacctttttacatcaaaaaaataagacaggaataacggctaatataacagttattcctatctatatttaatataaaatgtccgcgttttcaatcctattttaagggtatttgatatgctatcattactttatcaattttaggctttgaaacacttgattttatgcggttttattcccttaaaatgcggacatagaccgcttatttcttttccgttcagcgtctttacgcaatcgtatctttcggcggcatttatcacaatattttgaattgcgccctgtcggcgtatattcattaccgcaaaccgtacattttttcctgttcttcggcttcatcagctttatgtacaattccttatcattcggcaaaaccgctgttctgaaccatttacaattaagtgaatatgaaatactttgagggcagacgcaaggctcgccgtcatcaagtaaaatacaattcccgttgtcataattacagcattgattttttatcaatgctcggctccgccgcgcctgttcgggcgtcattcgtataatatcactcatagcgtttcctcacgcggctttttctgcggctgcggcttatcagtattgttttgttccttttgcaatctgtctaactttgctttaattgagggcttgacctcgaccgccgttatttttccgttaattctcataaacatttcaggtttagcaaaacgctctgaaaactgctttatctggtctttatcaaggctgccgaagttgtcgccagataatcctgctaatacaaatgttcctgcgataatatcgtacatattatcctctgcgtcataaagcgcacggtttaattccattctctcatttttgccctcgtcattacaaataagaccgacaggctccgcaaacggatatacaacttcaattctgccgccaacctctttctggagggcttcaagacctgtcgaaatttcctttatataaggctcctgcataggcggcacaattagaacggtcattttttgcggctccgtaggtacggtaacgcgatattcgtcaggtatgtttttaccgtcatacactttgtcaaactccgtccagcctgtttctaagacaataccgtcaagcaaatatccgccatgatcgtatgcgtgatgtttgccgtattcttcataattcatatttctttcatcaagcatatctcggtgtgcaatatactttccgtaatctgcccaattagatatattgtcaacaatattataatactccatattgtatgtaatatttattgcgtccgttatatttttacattcgccggctttaagcgcggtttgaaaaacggtcatttcagtatcttccaattccgatatacgcatagcaaaataatttagcgcgtcaacgctttcatacatagttaaacacttttttaaatcatcattgccgcaagcgtaatcatcaaaaaagtatgtatcagggcttgcgttttcaggtaagcctatttctgcaaatgtccgctttaccgtttccgcgtctgtcgggaaagacagttccgtaccgcttgtttctctgtttccgttgtcatattcggaacggttgacgataaaagctgcaaatttatagtcattcatattttttaacactcctttttcatttttttgtttttcggctgtctgttcaatattacggttgtaatcgggataattgaacggttcaccattaaaggttatttcccgtatgggctcaaattttgataatacacctttttgcaattccgcaaattcctgataatcactttttgtaaaagctccgttttctatcatttcagattgagataatacccagccagaaccgcataggaaagagaacatttttttattatcggaaataaaggttaaggaattatccgaattgttataaaacggcaatgattttttttcggaattatatagattgcgttcactttttcccaaataaacattaccgtcttttccgagaaaagccgtcagacctttataattatttaatgccgccgatgttatatgaacccctgtaaattcgggagcttctgtatattcctttaatcctttgaaatatgccttttgttgaccgtcataatttatgacgataatatcccttaaatcaggctgataaacagcagcgccggcggctttatttatcattaagcctacgtctatttccataggcgttttatactgttcaagcggttcggaacgaacaatctcatacatatccttatttatataatttcctttttctctttcagactttaagctatatccgcattttttgtcataatccgatttcagatgatagacagaatattgattttttctaaattccgtttcataagcattaaggcggttcatcagtgcgtcgccctcgtgtcccaatacggaagatatgagatgtttaatataaaatgtgtcgctttctaacattttatccgcaagtatttcacgctgcctttgttccataggaaattttgtcctgtatttcaaattatgcgctcttaaaaatgcgtctatttcaaaagcaagttcaaatacttcgtctaattcgtaatcctgagtagcaccgtccggctctctaaaatctttttcatctgccataggctaatcctccatatcaatatcaggttcaagctccagcttagaaaattcatcattcgtcatacgctccagcttgtcaataaccgtttccgtaatttcctttaattccgtatcttcaatgtacggaacagaaaaacggagctcttttaaaagctccgtcttatcagatgtatcataaatacacatcaaatttatttcgtcctgtgaaaatgtcatagtaaaatatcctccttttgttgttgtgtttttgatttcatcggttcggatttacccttgttttccgcaagctgctttttgattgatggctttttcgctgtccgttctgcaattatggcattgtataaatcaatatctgcctgcgttagtaaatctgcttcgccaaaatctttgcttaattcgacgtgggttataatatcctccttttcagcttccgtcattttatcaagctgcgccttgattttcttttttgacaaatccgcaatatgattgtcaatattgccgcatttcagcttttcaagtcgtttatgctcgcacgatagagtaaattttaattcttcatcagcggaaacactatcggcacacaccgaaacatttataacgtgtttaaaatgcttcggataatctaattcataaagattgcccttgatgacttcattttcaaaacccgttattttaatagcataggcaataatattgtcgtgtgcctgttcgccatagtatgtccaagtattatatgctgatgtatcttttgtaaagacgtccgtttcacaataacagtatgtaccgttcagacgcgacataaaaagtaaatacttatcttctgcactgtcgcttaacgctgccgtatgtattgtatcaacatcaagaaaaaaatcatttttgtaatgctcggtatttatgttcattattcggcgcagcgaatttataatatccacattttcaaacttacgcatagcttaaacctccaaagccgcatttttgaccttttcggatttttgcggctgtttatctgcctgcgcctttgcttccgccaactgctttttgattgacggctttttcttagatgtctcatttttggaaggcgttttgcctttcttaactttttccgcttcatttgccgcgataatatccataatagcgacaggttcgccattcttcgcctttgcttcaagctcgtcaatggtaggtgtgtctttggaattgtcctccggctcaaatacttttgcgccgtctgccgcgtctgcgtccgacaattcagaaaatccgtcctgttcggctatcttcgccggttcctcgtttcgtttctgaaattcagacggtaatgtaccgtctaatggtctgatatactccaccttgtcagcagcgttaaggacttcgcctgttaatggctgctgccacgcttttattttcggctcccaatgaaaaccgtttgcctttaattcggcgcggatattatcgtccggcttttcattaaaaaatacttgcagataattagcgtctgtattgattgcagcgtatccgccgttaaaatcccagcccgtaaattgtgtataatccgtttcctgttcggtctgctcaatatcctttgcaagctctttataatactcgtcaatgcctaatataatttcattcgccgttttttgtattgtgtcaagggaagcgtttaactccggtaattccttatctttgctccaacccgcaacatatccgaaagaataatcggaagtgtcaatcccatatcgctgacaaacggtataggcgacgctttcagcttcaacctccattgtacgattgttcttttgttcttcgggcgtcaattccgttgatttttctttgagaatattgtgtagtttagcgtgtgcaatttcgtgtatcagcgtttttaactgctgaacctcgctcataccgttttttacggctattcgctgttcttcaaaattacaatatccctttgctcccgtatctatatcctcatacccaataggcataggcgatattttttcaagtgcggcataaaactttttgaaatccgcaacattgcccgtaagctcgtcaactcccaaactcggcagcggttcgccctccgtctgcgacaagtcaaatacggtagcaactcggaaagtggggatagttacttctttttcctctgtaagcggtttaccgtcccagcctataatcggcttgtttgttgccggatttattttctcaatctgcttttttgttttgtatgaggacggcgcgattattttaataccgcgttcacctcgttttactgtgcgtttgtgattatcgcgccatgcgccaaatcccgccaccatagaagcgtcgggcttttgcattaaaatcaaaagcgaatttctaaaactgtaattatggaattttgacatacacgcaagatattccgcatatttatcgccgttaaatatgtctttcactccgtcctccagctttttcaaaatctcgctcaatttttcatagggcgtttcgccggataattctatcgcctgtacagaagcccttgacggctccgatttttcaggcgcttttgttgcttgtgcttttgccattagctcaacctctctttcagttataatattttccaaaggctgcggcttcgtattgccgaaccctcttatttctgttttcatatttgcgttatttctgtaaaacataataagcgtatcaagcgctttattaaaaatagattttgcggcagtcggaacggagggcgtaaaatctattacgcccgttttaccgcttccaacccagccactcacaaactcgttgaaatttgaccttatacctatacgccgatattccgtaacctttttataaaagaaatcgttgcattgtgtttgtattcccaaaatcaacgtgcctgtctgcggattatacataaaacggcggttttggattttctgaatatcaaatgtttccgtattagtatcaatccgcataattccgtttgttatgtcaatacgtttcatcagataccaaacctcataggctcaaatcgtttttttgccttaacggtacggattgcgtcttttcggattttgacttattttccgcaagctgctgacgaattgacggctttttttcttctgtttttacagcgtctttctgttcagcttcaatatcgggtatagagcttatacggtattcgtcaggaatatcatcacggctgccgttgtatatctctttaaaatcactttgattacacacaacataaccgtaatccgtaaatacaccgttttcattcagcgcagtatcatctccatactccttataatcaatgtaattttccaatgctttcagtgtgttcatatcataacagcccaattcattgataaggtaatatcccaaatcatactcgtctgtaatatctggatatatttcgtagcaatcaagattttcagttagatttatcaaatcctgtacactgtctgaatgttcgcccattttaacgatagccttaaaatgctgtacttccgcgtccgacatttcatctaatttgtctgcgagataatttaattcgtcaaggctctcatattcgctcaacatatcatatatcccgtcaatataacaatcatagtctgtaataaaccattcctcatacggcgaaccgaatacatcttttccgcctatacctatacgcctaaatacatcttgcatttcatcaggagtaacagggaacttcacccattcgcctactaaatatccctcgttatattttccaagattggtaacataagcggccaagtgaaaatctggtgtgccttctgtatctgccatatatcaacctcactttccgtcaaaatccagcctgaaatgtacatacttatcgttgctgtcgattaaaaccacgtccgcgtcataggtcttatcctttttctcggaatacaagccttttacctttgttctgccttttgcgagcaaatcagacgccattttctttgtaatctcttttcgcttgcttgtgaaaaacctgtcatttttccacataacgaatttacagcttttattagcgcaataaaagttatttttgctttcgtgtacgtccgaaccgcagcggggacatataccgataacctcacgcggcgcgcggaatatcgctctgtcctcgtctgtgatgaatgaatatgtggttacaagctcccttgtcaaatcctcaattcctttcataaactgctccggcggataattgccctttgcaatctcggcaaggttattttcccaatcggacgttagaataggtgatgtgagcttttcgggaagaacgctgacaagacttataccgttatgagttgcaacaatagacttgcccttacgctctgcaaaacctgtctgtaccagcttttctataattgccgctcttgtcgccggcgttcccaagcccttgcgttccgcttcgtccgttgtttcggcggctcctgccgtttccattgatgataatagagtgtcctccgtaaacgctttcggcggtgaggtataaccctctttgacttctgatgaaacggtaacggtttcgccttttgtaatacaaaatacatcttcggcgcggtctgtgtccgaatgaatatatcttttaaaaagctgttcgatatttttccagccctcaaataaaatgattttaccctttgccgtaaactgtacgccgccgcactccaaaactgcggtaatcgtttcatactcatacggggaattaaccgcacataacagcttgcacataataaggtgaagtatattactttcgccgtttggtatttccgccaagctgatattttcaatttctgccgtcggaataatagcgtggtggtctgataccttttcattattgaataagcagaatgtatcaggcttaaaatccgtacagtttgagaacggcgcgaattttgacgctatatgaacgattttaataacagtattgtgcatatcgtccgttaaatatcggctgtcggttctcggatatgtaatcagcttcttttcataaagcgattgagcatagtcaagcgtctgtttcgccgtatatccgaatattcggtttgcttcgcgctgtaatgttgtgaggtcaaacagtttcggcgcgcctgttttctttttctctttaacagcggaaatacaaacggcctgcctttcgtggcaagccgcttgtaaattctgcgcttcgtctttgtcggaaatcttatcgcttacagccttaatattgccgccgtcaatttcaacggtataatatttttctttcctgaacattgaaattttgctgtcccgttctgctatcatagcaagggtaggcgtctgaacgcgtcctatattcaaatgctttctatacagtgatgtaaacagtcttgttgcgtttataccgataatccaatcagcttttgcgcggcataacgcggaattataaagattatcatactcgcgtccgtctttgaggttattaaatccctcgcggattgcgctttcttccattgaggaaatccataaacggaagtacggctttttgcagccacacatattatatacaaatctgaaaatcaattcgccctcgcgtcctgcgtcgcacccgtttataatctcggttatgtcgtttcggttcattaaaccgctgacaaccttatactgattttccttgcccttgtttatggcaaactgccatttttcaggtaggataggtaaatcctcatatttccataccgcgtatttttcatcatacgccgctgcgtccgccaagcctgcaagatgtccgatacaccaagtaatgatatatccgtttccctcaaaatatccgcttttcttagcggttatgttcaaagcctttgcgtagctctgggctgccgacggcttttccgcaattactaatttcatttatttaatcattcctcctttatttttacatacaaaaacagcacccaacaatgagtgctgtttttgtggttgtatattatcctttataaaacagttataatatcctctgaaataccgtatttttttgcaactgcttttactaacgctctttctgaatggtattccgtattatccactaatgtttggtcgtcatataattcctcatcatcttcatcaaataacattatatgctcaactcgatatatgccaattaagttttctggcatttctatggataattcaacacgtcctatttctcctattacatcaggtagtccgctatcatctaccgcccaaacttcaccatcactaactacaatcattccattacctgtatattcatcaaccttactcatatacaatctcctttctacttgttagtaagtataaaatttcttgaataaatattatatcataaacaaagtaatattgcaatatattttattcatcttctgtatatgtatcgtcctcgttttcggtttcctcgtcctcgccgtcggtaaattcaaaatcttccaaatcgggggcgttttccatattcttttttggaagataaaccttgaaatagtacgcgccaagaccgcctatacctataatcgcaatcagaataagcattatacttgaattgcctgactttgatttatcggttttcggcgcggttttcgtcttaccgtccggctccgccgacggcgacgcctgcgcctgcggtgtagggcttgcttttactgctgcgggtactgccgcgctgttttcctttgcaagcgcttcaaggtcggatatatcaaccttattcaagaaatacacattatcgtttacattctgcttgtcgataacgataaaaaatacgctgccgtcctttgcggttacgcttataaactgcaatttatcactgtcggaaatgttgtctacaacgtgccccgcgcccgctgttgatatggtacgcgccggcttcggcgtttccgttgccgccggcgctgctgctgtactgtcatagtttgcgtgtgcggttattccgcacattccgccaaagcataataaagctgctgataatatcgcaataattttattcttcattcgtgccgtcctcctgctgctcgttttcctcaatagcctttaattcctcctcgtactcttcgggaagaagaacatcaccctttgcatacgcgcttaaaagtacggtaagctggggagtgctaagtttaacagccttaacgagatttacaatctgcaaattctcggcttcgactttctgcgcttcaagattgcgtaatttttgctgatactcgcttatctttgcttttgtccttataatatccttttcgattttttcaagtgttgccataattaaaatacctccataaaattaaattttttgttttgcgataaattcatcaatctttttatcgacttcggaaaatgtattcccatatttgaacttttgacttgcaaggtttttgtcctttgataatatttcaagctcattccataggtcagggtggtattgcttcaaatatgcaaactcgccgtaagtcgcgttaggacagaaccaacaaccgccccttttgtgatacttatatattggggacagcaaatcatacttgctgcataaatcataagccatttgttcagtatagccatattcggcaagtaatgatattttatttgtaccgtcaagccttgtaagcctcgccggttcgtctgcggctattccgacatattgtacaaatccgccatttacatttttcaaataatcctgaattgcttttatttttatacggctgttaattgtacacattccacctatcggaaaaccgctttttcttccatttcttaacggatttttagattttgtgattatctgatgaaaacaatctaaataatcttttgtcgcgtgtaatatttcaaccgtataaccccattcttcaaaaacgggaatagctctgtttttgataaagtctatatgttcgggtaattcgcctgaaataccgcgtttcttatcaaacattacctcgctgaaaatgacggttgacggcggcaagttatgaatatgactaagtattattgccgccgtactgtccttgccaccgctccaactgtaaagataacgcatatcaaccgcccccaagtctgccaaaggcgtaaaaatgcgaactccaataggaactatcaatactcgcgtactgaatagggttgccgcaatgtatcatcataccgttaccgacaaatattccgacgtgggttacaggctcgcccgcgttatatgtgcctgtaaaaaatataatgtcgccgggttttgcgtccgctcttgacacaaccgcgcattgattaaaaataccctgcgctgttgtacgggatagaggatatacgcctgacgcctgatatacccagcatacaaaaccgctgcaatcaaaactcgttgacggtgaagaaccgccccatacatacggataacctaagtatttttcggcttccgttataagacgtcggaatgtagcgtcgtttaatgcttcgccgggtatggtataactcggcggcgctgccggattagaataaatatcgtccgcaaataaataatcgcggttgcccttgctttcaagatatataccgtataattcccgctggtcgtccgtaaggttcgtatttgtaagcatagtaatattcttgtttacaagcgtaacattgagtattttatattccttgtcgttgccctcgtcgtccgtccttgtttccgtctgagatgtaagcgttaatatatactgctgttcaaacaaatcatcaagcggctgttttacatcatcaaaagtgaaatccatatacaacgccgtgaggtaggaaatgagctcatacggattatggcctatctgcgccaaatcgtaattgtattcgtcataacctccgtaatcgcgttcaatattgtttatctcactttgtaaaccgctttcaaggtctttgtaatagttttccgccgcgtatatatcttcgtcctccgcaaagtatgacgataccataattgagttaaagcccgttgtacccataaccgcgcaagatgaaattgtagttgctatccaagcaattattaaagcaatagcaagaatgacgccgaatacctttttatgacgctttataaattcaacaacgtacaccgtaacgtcctttgtggtctttgcggctcgttttgcctttttagcgttctgttcggcgcgcttcgcctgctggtattttttcttaatctgctttttctgaaaaaatttcctcaaagctgattttttcttgaaatcgggattatccgcaagtgttttttgaacaaaggcctttgcttccgctttctctgctctgaattgcagacgcgccgcttttttatacggcgcgtttttgcggttttgtataatcatacgccctgtacggtttccaaaccgtaaaatgctttcggctttctgttctgtcttatgcgcggcttcaattcctgtattttcgtgttctgtttcgctcacttttgaatgtgccttgtttaatacggtcatacctgccatatccgccgcattttttacaggggaacggtggtatatatcggattgaggcttaatctctttttcaaatttcagacgggttttagctttctttttcttttcatcataaacacgctgctttttaaccttgcgcttatgaggtaatttgttttgtgctttttccgccttgcctttgagcttatcggctttcgcctgcgccttttccgctcgcttaaactgaaaatcgcccttttcgggaatatctaaaacagtatcggcgttttccgccgactctgttttggattgcttttcctgatataagcggtttttgcttccggctgtctgtttttcggttttatcctctgacggacggaatgaaaattccgtcttgctttcccgcgtttcaaaaacaaaatcctctttttccgttactctgtcaaaaaccgtatcgcctgcgtcaaccgcttctttgatgttgtactctgctgttttttcggtcttgacgcgctttttctgataggctcggtttttatccggctgcttcggattgccgtctgcggaatccttttcggaatccgcgccgagctgaaaatccgaattgccgtttacacggtcaaacgcttcatcaggattatgtgtttgctcggtaaagtcataatttccgttatcttttaaggcttcggcactatccggctgcgtttcttccgccgtactatctgcggaatgttcagtaatatcaacatcaaatttcttttgattaaatttgcgctgataccgtttatttcttgccgccgtagttacggcattagaaaaaccgccacttttgggcggctcgtttgtcggcggggaatatggtatatccggctgactatcaaggttaatattctctaagtcctcttgctgttctgtattattttcggtaggctttaatatttcctgactgtctgacggattttgtacggtagaagtatcaagcggcttttcggtatctaaaaatttctgctgatacctattatgttctgaagaagtaaagggcttcgcgctgccttttgcgctctgccgtccgagaacggtatcggcttcaaccttttttgaaaaatccgtgtccttattccgcgccttaaattcattgtctttcattcattacctccgctgttaaagttcgagattatcgcgcttttttgtctgcgtcggcttcggcacgcttttctctgccgccttaatggaatttaactccttgcggattgacggctttttatctgcgcttcggctgatattttccgtctttgccgcttcctgagctttttgcattttctctgtaacatatccgggtagaagatgttcgtgtaccataaaggatttttcatattctttcggaatgggcggggaaatttccgtgaataaatgtgaataggcttttattctgccttgtatatatttttccgcttccgccttatccttaaatgagcgttcttgttctgcaatacagttattatgaccaactggactatttgtgccaatagaccatttcacttcccagcgtcttgttttttctgaacgccagcttgtgtaatcatacatacggtatgtcattttatataccatattactgatagatgtacaatcgtagttataacaatctctgtcgtttacccatttatttgaagaatgcgaaacctccggtacttgcaaatactcaatagccctgtcaaattgtcttgtaattgccgcttttttttcccaatcccgcgctgactgccgtactttttcaaaggcggctgtttcttttttgacgttattatcacgcatagcctgtattttttcaagcggttgtgaaatcaaattcaatatatcggtttcattaacgattatggtatgctcaactttaagtgtggcgccggctgataaatcgtcattttcataagtacggtaattatcgtaatctttgtacatatatacctcctgacattttttattctaattcctttaatcggatagggcttacaatctcatagccgcgtcttgcggcaagctcggcaatatcggcaatcagctttttgcgttccgcgcgctctatattcctgattgcttcatacgccgtaaaatccttgcacccgctgccgttaagaaaatccttgttttctctgcttatatctgctcacctccaaactcacaatatttcttacatcttcccgtttcaatatctgaaatgaatttaagtatagggaacacctgcggaggacatacggcattacctaaggcttttagcctgtcggctctgccgtccgtcctgtccgttatacgcggaacgccgacaggttcccgttcccacaacttaaatccgtccattgcttcgggaaccccattaaccattccacccaatcgggattgagcgccgccgtctccgactgcggctgttcctctaatatcacctgcgccgcaaggttcgccccgtccttgcttttcctcattacctccggcggaaattttgaccttatcccgtccgacgctaccggcgtcatatagaacaccgccgccgacagcggaaggctccagattgcgccgtttttgttcttcttccgaaatatcccgttgtctgaaagatacacattcatatttacagccgccgtctgctttttgttgttgtcggaggcaagcggagtgggaaacatcaacgccgacgataaaagttcttgtgcgctgatgccacgcgccgacaccgcaagctggtaatacgaatgtttgaacagtgtagcccgctttttccaagtcaaaaatcgttttgtcgagccccatattgatgaacccagcaacattttcgccaagcacccagcggggcttgagctctgtaatgacgcggcacatttcaggccacaagtagcgggtatcttcaaaccctttttgtttccccgcgcttgaaaacggctgacagggaaatccgccgctaatgagggtaacgctgtttcgtcctgttttttcaaaaaatacctcctttgttagagttgtaatatcacgaaatcggggcacgcgaggccaccgcttttcaagtatggaagtctggaaatccgcccattcacattggcagacggttttaaaccccgctgcttctgcggcgaggtctattccgcctatacctgtaaacaggcttaaatgcgttaaatcattcatctttctgtatttcctccggcttcgtcgtcatatacgaatacagcttcaagtctttcgggaaacggtctacaaacggaatgattacatttccgtaaaataaaagtccctcgccctcgcccgactgcgttacatacgataattggtgaggggatatattaagctgcttcgctaaaatctgtctgtcgccgcctgcctgattgagcatatagataaaatcggaattttcaaaaatattctcaatctctcttgacgataacaggtctttgacattctgcgttatgcctgtcggaataccgccccatttacgaaagcgtttccaaatctcaaccgaatatgccgccgtctgttcctcctttaacagtaaatgaaattcgtctacataataccgcgtcgccttatgctccgcgcggttaattgttactctgttccatacctgatcctgaacaatcagcatacccagctttttaagctgcttgccgagctctttaatgtcatagcagacaatacggttatttacatttacatttgtacggtgattaaacacgtttaatgaaccgtttacatacaaatcaagcgccgacgcgatacgctgcgcttccggctccggcatagctttaagctcgttatataaatcttccaaaatcggcattttagacggttcgggattagcgaggtacggacggtatatatttataaccgctctgtcaatcacgcttttttcaatcggttcaagtccgttcttgccgccgacaataagctcacacaatgaaagtataaaatctgattttaattgtacgggattttcgtcctcgctgtaattgaggttaatgtccattggattgatataatcgtgcgagttcggggaaatccgtataatctgaccgttaagccttgacacaagcggcgcgtactccgcttccggatcgcatataattatatcgtcctgcgttacaaggaaagcgttagcaatctctcttttcgcgctgaatgatttaccactgccgggtgtgcctaaaattaagccattcggatttttgagcttctttcggtcaacaagtatcatattatttgataatgcgtttaaaccgtaatataacgcttcatcgccggcttgaaaaagctcctgcgtagtaaagggtacaaaaatagcggttgacgaggtagtcaatccgcgttgtatctctatttgatttaatccgataggcacgcttgacattagcgcctgttcctgctggaagtcaagacgctttaatgcacagttatatttttgagcgataccctgcgccgcgaaaaacatattatcaagtttttgtttgttatccgccgtattcatcacaagaacagtaacaaggaacattctttcatttctgctctgcaactgctctaataaattctttgcttcaccgccgaatgtcgcaaggtctgacggtataatatccatatcataaccgcttctgaccgcctttttctgttcctcaatcttcatcttgtcaaggtcggttattttccgcttgaccgtctttatagcttccgactggtcgatagacttaatatgaatatttacgcctattcccatatcgaggtcgaggaaatccgcaagcatacggtctgttaattcaggcgcgagtatctgtaaaaatgatacagttccaattctgccgcccattccaaacgtgcggctgtcgcggaaatcaaacgaggtaggcgcaataaaatcctttgaggaaagccccgtcttatgtaccaaatcccaatgaaagccgaatttgtctttttcgccctcattgaaagtacagtgtaaaagctctaaacgctctaatccgttaagcggtcttgcctgtacgccaagagccttgaagttgccgagtatatctgtttcgatacgctctaacttctgcttagccgcctttaagttatccgcttcaattccgaatgtgataaatttgcgctttataataccgttgtttccgcgcgacaactgatttttgagcatacccatatactcaatgcgtatgtcattaaaattgtctgcctgttcgggaatatgtacggctttttcatactccgccatatcgacagtctgattgaggaaagaaaactgtacagaaattgactggtcgaaatagttaagaaaatcgcagtagttttcaaatatctcgtttttatcctcattccttgcaagctgataatttatatcgaaaaactgaattgtttttgtaaaataattatccttgactttacatatcccgtccgggtacatttccttatatggaatagtctgctgtgctgacgctgcgcgcctgccctgcatttgcgcttttctgatagctgccgcaatagcctttttctgtcgtgctgaaagcggcttattcgctgatattatgtgctttttcttttgttttggtcttgtgtttgtattctgcttcggcaattattttgacctccttatcaagtttaatttggttcataattgccgaatacatattatttgttttatacggtctgactctcggcgtcaaaaatcttgaccgtatataatttcttaaaatcttttctgccggctgtccgtccttttcgtacatagcgaggaagaagaacggcaaggccgcgattacaagcgtcataaccgcgccggttgtgccaagcgcgccgcgcgtaagaaagtatgtcggaacagcgacagcggccgcaagtccaaagcatataagctgacgcttcgtaaggttaaaagctacctttgtttttacggtagttaaatcttttggtacgggaacataaggaataaaaattccccctttcatttttttatttttaatgtgcgttaaatattgactttgacagattacctgtcttgaacagggaaaagcatagtacaaccgtatatgccgcaatcgtaaatatggtagtatgcagattattggttacaacaaaaccgtttaccaacgccgcataaatgcctacgcataccataatgaaaaatccctgaaagcctaatgccacaagtccgcgcaaatagttatttcccatttgcccccattcgcgattagtcattgtcgcaaacgggatagctccaaccgagcaatataaataaatctctatcatacgtccgaatattacgacggtaatacaaacggatagaattttcatacataaactaacaagcgaggtttccaaaactaataggaacagttcgcccattcccatagcttcaagagtagttcgtatgtcggcaagcgcggaagatatatcaatgttcgtgttcgcaccgattacccccgcgctgttcgttacaatatgctgcgcaacgtcaaataccgccatagtaatgtcaaaggtgtgggtaacaatataaattgctaccccagcctttaagaaatatttgaagaacataaacgtgtctatatcgtgcatattgttcttttccgtaatcatagttattagctcatagcataagacaaaggctataataagccccgcaatcggcagaataaccgtctgagaaatattctgtatcaaagaaaatatgcttgcgttccagccctgcggcgtctgtccgacgtccgccgcaatcgtggcgactttctcgtttacgtcattaaacattgttgataaactaccctcaataagcgaaatcagaaaatcgcaaatcgcttgtgtaattttatcaattattgagttcatcagctaaacagccctgagagcaagggaacaagtgtagttccaatcagcacgacgccgccgcccgccataagctgtttaattccctgcgactttgcgccgggattatcgttgccgtatccctccaagagattgacaacaccccaaaccgcgaggcctgcgcctaacgcgattacaagagtttttaaaacattgaccgcttctgtgaaaaattgcataaataaaatcctcctaaattttaatctgtctttttttcttcgtccggcacatctacattgtaaaggtcgaattgttcattttcctttacaaccgccggtctgcggttcaaaaatcgttcaatgtcaaactcgtttttcttgtctgcgtctgataaatacttatagcgcgggtgcgccgttatatcgtacttttcagacaaaaacggacggacgccccttaattgcaaaatgcacttgccgccgtccattaccgataattcgtcctgcgtcatcagctcctttcctaatttttgataattaagtccgtaagatttttgattacttcgcgtttcggaagtattgtacatatcaatcgtttctttgccgagcgtttcggaaatctctttaagagtagttttctctttacctccgagaaatagggtagtatcgcaattacctataatcgtgtcggcgttatccttgtaaatagcttttagctgactttgcgcctgcaagattattgacgccgatatttctcggcttcttattgtggcaatcagcttttcaaattttggtatttgtccgatattcgccatttcatcaagcagaaatctaacgtgtacgggaagtctgccgccgtaaacgtcgtccgccttatcacaaagcagattgaataactgcgtgtacatcatagcgactatgaaattaaaagtatcgtccgtatcggaaatgataacgaacaacgccgttttcctgtcgccgattttgtcgagctccaattcgtcatattccattaagtccctgagttccttaaatagcgataggtaatcctttgatgttatctccggattttcccccgccctaaaccgggcatgaacctttcagctcacccggcttgccatcaggaacagaatttatttcatctcaataactctcaacgtggacaaggcttcttaacttattgagtttttctttctgcttttggtcaaggcctaggatttccatatactttctgataatatcagggtttgtagcatgaatcaggtgatgtacatcttcacataccaacaccagattttgataattgtccttgccgcctaaataccgtggcactttgtgatggcaatgaatatcgccaatagaaagcactttgccagatacggcgcattttcccatttgggccgaatacagtgaaagcctgttatcgttgtattcgatagtacggtacagaaccgggttcctcattaagtaatgaagaaccgtcatgtcgattctgtccagattcttatggatttcggctctgccctcgggcatataggaattgattttgcggttcatggactttgggggcttgtgccgtatgtagccaatcgggacaactgcgtgtccggctacatatcggagctgtttgcttttcccataccgttccctgataactttcggaacttcacacggaatcttcctttttctgacctgttttgcagttttaacccgttctttcagtcttgcccgcaggctcttgtggacagataaggcgaatggcgtaaggtcatcgcagacctttgtggctaattgatagtagtcatggattcccattacataaacgttgtagcggcaaatcgcctgatattcagtacgtttgccttgtgacgggaactcaatgtcgtaaatcagccgttttaagtttggttttattttcgcaatagatttctctctgatatggctctctactacatatttggcgcgtccgttgctccgtttcccacgggggataacctttaacttgaaaccaagaaactctgaatactgctctttcaggttaatcaccttcgatttttcaggactgatttcaagagaaagcctttcatggagccagcttttggttgcgtggaataacttcaccgcattttgatagctgttcgtgaatatcttaaaatcatcagcgtatcggacgcaggtgacttctttcagccttgtcctccgcagtgcggcaaatttatggctcttgctcacgcttccgttgtaattgaccgattccttgtaagggaactccgttggtatttcttcccattggctggcaagccaccaatccaattcgtttagaactacattggatagcaggggagagataatacctccctgcggcgtacccacctccgggaatcctatcccggccacctccgcttttagcatagctgatataatactaagcagcttcttgtcttggattcccattgtccagagctgtttcagcagttttccgtggttcacgttgtcaaagaaccccttaacatctatgtctacgacatagtggagattgcttctctgcatatttttgtgaacctgggcgattgcgtgctgttggtttcggttagggcggaatccataactgtggtcgtggaatttcgcctcacatatcggctccatgacctgcaatacgcactgttgtatcagcctgtccataatcgtcggtattccgagcgggcgcttcttcattgggtcatttcctttcggaatttctacccgccggacgctttgtgggacataccagtttaatttgcgctgtatggcgcatataagctgttcatcagagagtgctgataattctgtgattgtttttccatctgtgccgggcgtcgtactcccgtggttcttcttgatgttgcggtatgccagccgtatgttttcgggtaatgcaatgatttcaaccagatgtttgaaaactttgcctttattgctgtcggcatacagcttatcttgaattgcctggaagtcataatactcggcgtgccttaacttatctttcttctttgcctttcctgttgccatagtcggttacttatccccactttcgtttggattttcgcctttcttagtcctactcgaacctatgcgtgtttattgaatatgattttgtttctgttcctgactacagcccgtccctccaccgcttactttgttcacggcttcacaggtagcatggctgctctttcctcccggattaagaacggttataccgcacctcccataaaaggcggcacgattttcccgcccattgcttcatcatgcgtatccactccacatccggggctttccacgttccgatattcctatctttgcataatacccttaaccctgccctttaggcctgtatgcctgatggtgcctgtaacaccatagggaatttcatatcgacaaatcttactttaccccacatacgccgttttcacggctatggcatttctgccatatcccgttatagacctgtacattcgggcttttgtcagcggtagtcagccgcattctggacataggtactttatagacctccggcctaacacccccggccacctctggctcggctttgctttatcccccaaaggggacagtcgcgggtgcagacagccgacttcagcgtgctgtgtcagtcgcgggaaatacgtcccgtttcttccaacgcagtatcaagggaagcgtttcagggcgttaccccgccattccacttctcggaatatcagttagaaaggctatagcctttccgtcacttttacctctttgcaggaaaatcccacgcagagtttatatgcgacaacgtgtcgctgcactgtcgattttgctgaccctatggcaagatataaagagataacagagcaaacaacaaaatcgaatcctgaaacaatgggcagatttcatacaaattggcttaatatgatgtatcctagattaaggttagcagcaaatttgcttagagatgacggtgttatttttattagtattgatgataatgaggtagacaatttaaagaaaatttgtaatgagatttttggtgaagaaaattttattggatgcattgcaaattcaaataatccaaaaggtagatctgatgataaatatatagctacagcgcacgaatatgttatagtttatgcaaaacatgtagatacattaaagtggtatggatttgagccgtcagaagaaataataaaaagatataataaagtagataaaaatggaaagaaatatagagaaattgatttaagaaaaacgggtgaaaacgatcttagagaagacagacccaaccttttttattatttttattataatgagataacaggagaattttatccgtcaagattagaagaaaagaacgatggatttattcaaataaaacctcagagggaagacggaaaagaaggaaattggcgatggggattagatacagcagagaaacagttagatttacttgttcctaaatttatgccagcccgtaaagtatggggggtaatgacaaaagattatttagaaggtagatcattagttaagccaactagttcttggacatttaaagatgtgaatagtgaacggggcagtgaagaatttataaatttaggatttgataaaagaacttttcccaaacctaaaccaataggaacaatcttgcgttgtatcaagttatgtacaaacaataatgatagcgatgacataattctggattttttcagtggtagcgctacaactgctcacgctgttatgcagttaaatgcagaggacggaggaaacagaagatttatatgtgtgcaattgccggaactttgtgatgaaaaatcagaagcgtataaagcaggatataaaaacatctgtgaaataggcaaagaacgtattcgacgtgccggaaagaaaattattgaagaaaaaggcgatcagattggaatagacgacgaagaaaagaagccgcttgatataggttttaaggtattcaaacttgatacctcaaatcttagaatatgggataatacgcctattacaggtgataatcagatagagatgtttacagagcgtatgaactctatgatagacagtatcaaagacgacagaactgatatggatgttgtctatgaggttatgctgaaaatgggagttccgcttgatgtccctgttcaatacataggagttaacgaaaaagtagtttataaagtagtttataaagtagttcatattgtaggcgacttccttttaatgattgcactatttgataatataacagcagaagatattgaagcaatagctgaatatgctccggcaaaaattatttgtgccgaacacggatttgcagacgattccgcattgtcaaacgcacattatattttgaaggatagacaaattgaattgaaactgatatgatgtacatgggttccgtaggggcggattccatatccgcccgaacaaccaacccacaaaatatattttgcccggtatgtgcggattcaatatccgctcgcataatcaaaaacacatttatacaaacaattaatatgtatgaatatatacattgtccgatttatgttgtaatgccaaaccatttccattgtataattgcaatacaaagggatggggaaaatgcggcggatatagaatcacgggcggatatggaaacacgggcggatatggaatccgcccctacggtgtcgctgccggatgtaatacaatcttttaaacgacattcaacaatagaatatataaaattggttaaacaaaatattttgccgccgtttgataaacagatttggcagcgtggatattatgaacatatcatacgcaatgaacatgaatatcaaaaaatatatgaatacatagaaaataatccaattaaatgggaagaggacaaatattatgaataataaattagacggactttcaatggatttagaaaactcaaatatggagaaattaaagactgtgttcccggaatgtttttcagagggaaagcttgatatagacaagctgttgtcactgtgcggtgaatacatagaagatgattttgaaaaatataaatttgagtggaagggcaaagcggaatgtttacatcttgcacagaagcgttctacgggaacactaagaccttgccgtgaagaaagcgtaaattttgatgataccaataatgtttatatagaaggcgataaccttgaggtgttaaagctgttgcaaacagcttattacaataaggtgaagatgatatatattgacccgccgtataacaccggcaatgattttgtgtaaggtgaatccacatcgcacgcttgcgtgcacaacccaaaaacaaatttataaaacataaaaactcaaataaaaaataaaaatcaatgaacaacggcaggtaagcggagcgaacgcgtgaggtgaatcccaccgcacgcttgcgtgcacaacccaaaaacaaccttataaattccagtttataattattttataaaattttaataaaaattcaggaacaaaatagtattaaactgagtcatattataaagtgttaagaacttaaaggcaaaatataaagtccagataaaatataaaacataattaataataaaaatatacaatttgacggaccataaattacctttgtttcttttacataacatttgccgatttttcttgacttgtgacggcatatgtggtaaaacataatagaattttattttataatggaggaaaaaacatgagacatttaaaagacatagcgttagcagtggctttatgcatgattatatcaattgtgccaatagtatcttttgcggacgttatagacggtacaaattctgatatcgttacggcagcggatacaacagacccggaggcaacagcaacagcagaaccttcagcaactcctgattcagcagatccaacaagttcgcctgaagcttctgaggctcctgattcatcagaaagcccggttcctaccgctactgctacagcttcgaattcaagctcaactccggcgccgacttcaacggctaagccgaatggaaagtatagcataaacgttaataagacagaaaagtcaacaatagttccatcgccttcagcagcggcttccggctcaaaagtaataattaaaggaaacgctgacagaggatataaatatacagacgcttattatgtagattctaaagagaataagacttctttaataagtaatgacagcaactcattctctaagacgattactatgccggcgtctgatattacggtttattcaacagtagaggaaatgtcagcgagcgagctttacgaggacgcagttgatcagtatgacactgttactgccgacataaatagttatactaagacatatattaataattcttctgattataattccagtgatatatcagatatgaaaaaacttattacatcagctaaggcatatttgtctgatttaaaatcaaattataatgtgcttaaagaagaaattgatgacaaaaatcccacaaagagcactatgagtgatgttatttattcacaggaagaccttgatgatgtctcagctgagcttaaagaattatctgattctatgggcggtgaggatgtcgactattttgacatgacagttactgttggaaaaggcggaaagctcactttatctggacttgtttcaggaacagtaaatggttttagctcaaagactacagatacatttgacgaaatatataacgacggctcaagttctattacatttaagataaatactcagaatggatattcactttctagttttaaaataaatggaaaaacagtaacagtttcaggaaacaccgttacaattaagcagtcagctctatcaaattatatttcaggcggtacaatgtccgttgtagctaattttggatattcaaacggcagcggtagtggcggaacaggcggaaatacttataatcctgttataaaagatcccgctacacctaccccggctccaggaaataattctgtgtttaccgacttaggttcagtaagctgggcagaacagtcaatcatggctctttataatatgggtattgtaaacggaatgggcgatggattgtttgaaccaagcgcgcctgttacccgtgaacagtttgcaaagatgattgttggtgttatgggataccaggttgatcagaacgcaaccacagaattcagcgacgctaacggagactggtatacaccttatattgcggcggctgttgaacatggaataattacaggccgtgatgacggcacatttggcgttggacagaatattacgcgtgaagatattgccgttataatattcagaactcaaggttcacctgcagctgagatgcacgagttcccggattcagaccaaataagcgactatgctgaaggcgctgtgtcttatctgtacagcacaggtatagccaggggtgatgataatggatacttcaatccgaagaattcggctacaagggctgaagcatcaaagatgctctttggactgtatggaataatcaattccaaataaattttttaaaaagcatggcgccgccttatttttaggcggcgctattttatgttttatatatttataattactataatataaataataaaaatatatacataattgccaaaatggtcgttttttaattagtattttttcttgtttattgaaattcaggaacttttatgctatactaaaagtctaatgagaaatggatttactgagtataattaaatgataatgttaacaagccgttaaagttatagattatatttattttttattgcggtttcaattaacattttgaatgtgggtcaaagacatatatttgtattcaggagtacgattgtttggttgaaaatttgttataaaggaatgtgaatttgttttgaaaagattttgtttaaatttgtttcttctcattggaatattaataatttgcggtacatataccatatccgtatacgcatatgttgatgacagccagcttgagcttgcaacagatgcttttggcgaagtgggtgcaacaattgaatataagtatccggaggacactttaactgttgaaaaagacggtcaggttgctgttatgaagttaaggagccgtcttatatatagagacggtgaatattttccgcttgaacgagaggttgttgtatataacgacagggcttatgtttcaccggatgccgttgaaaaagcatttggtcttcagccggaaagaacaattgatccttcaaaacctatggtgtgtttaacttttgatgacggaccttattctccggtaaccgattctatattggatattttggagacatataattcaaaggctacgttttttgtggtaggaaatatgatatggcagtaccctcagaccttgaaaagagctcaggagcttggtatgggactgggaaaccatacatattatcatcctcatcttccaaaatgttcgtgggatcaggtggttaatgaaataaatatgactaatctcgatgctaaaattgttttaggagacgatttgaaaatggttcgccctcctcatggtgaaacaaatgatatggtgaggtcggccataggtcagccgataataaaatggtctttggacactttggattggtcaaacctgaattcagggacaatttattggacggttatgaataatgttaccgacggtgacataatattgatgcatgacctgcttgactgcacaaaagaagctgtttcgtggatggttcctgatttgttggaaagaggatatcagattgttactgttgaagaaatgataagggctaaaggatggactttggaccctggtgttgaatattattcagttaaaccttagtttataaaaaatataaaaatacatataggaagaatattatgaataatgaagattacgtaagtcaaaatgataaaatttatggacgaaacccggttattgaagctcttgaatccggtcgtacaatagacaggctgtatatacaggaaaagttaaaccatcccgtaattggaaaaatcagaaatatagcgaaagagcaaggtgtccgttatcagtttaccgctaagcaaaagctggataaaatgactgacggcgctaatcaccaaggggtggtggcagtgactgcttttcacgattatgtgagcgttgaagaaattcttaaacgtgcggaagaacgtggagaatccccttttatagttatatgcgaggggctgagcgaccctcataatttgggtagcataataagaactgctaacgctgcaggcgcccacggagttataatacccaagaacagaagcgttgctcttaactcaactgtggcgaaagtgagcgcaggagcagtagaatatacttatgtggcaaaagtgtcaaatatttctcagacattggataagctgaaaaagaaaggcttgtggattgttgggactgacatttctgcggctcagaatcattatgaatgcgaccttaaaggcccgcttggaatagtcataggcagcgagggaagcggtatgagcagaatagtaagagagtcgtgcgattttttggttaagattcctatgataggagagattgaatcgttaaacgcgtctgtggctgccggaattttaatgtatgaagcattaagacagcgcagaaattagtagatttgttttgaggagaaatatttatgagaatacttgccataggagatatagttggaaaacccggaagagagtatgtttatcagaatttgggaagaatccgaagcaaatataatatagattttgttattgcaaacggagagaattcagctgcaacaaacggtataacgcctattatagctgatgagctggttaatgccggggccgatgtgataaccatggggaatcataccttcggtactaaatcagcagcacaggcgcttgaagaaaatcccaggctgattcgtcctctgaactatccgccggaatttgaagggagcggatatataatacaggatttggggtacgcaaaagttgcggttatcaatcttatcggcagagtaaatatgtctcctgcaaactgtcctttcagagctgtagagaatctcttaaagcggattgaaagtgatattatagttgttgatatgcatgcagagacaacaagtgagcgtttggctatgggcaattttttggacggtaaagttcaagttgtttttggcactcatacacatgttcagacggcagatgaacatattttgcccggcgggaccggatatatttcagatttagggatgaccggtataatggactctattttaggggttaagaaagaaattattttaaattattactataatgcaggaaagcattatcgttttgaaaaagaagaaaacggagacgtatggtttaacggttgtgtttttgagatagataataagacaaaaagtgtcgtagatattgaaagacttaggttcagcagaatttgaggtgtttgaatgaacagtgaatttaaagttttggaaaaggatgaacggagctatcttgtggcggagccttttgaaaagctgggtgttataaatggattttcacgcaggcttggtggggttagcagcggaaaaatcagcggtttaaattttggattcagagtaggcgacgattctgatgcggttttagaaaactatagactgcttgctgaagacttaggttttgatatacgccttggagtttgcgcaagacagatgcacacggataatatacgtattgttactgaaaatgactgtggaaagggaatttttcagcaggagagcgatattcgtgacacagacggtctgataacaaaccaaagaggtattgctttaataatattttcagccgattgcgtccctttgcttttttatgacccgattaaacaagttgttgcggcttcacatgccggttggcggggaactgttaaacaaatcggcggtaagactgtgcgtttaatgaaggaaaaatttggctcagaccctaaagatataattgccgctatcggaccgagtataggcaagtgctgttttgaggtggaccgtgataccgcttcattgtttgacgaaaaatattgtgtttcaaagccgaatagtaagtttcatgttgatttgtggtccgttaatagagataatttggtttcagaagggttagaacctataaatatttatatatcggatgagtgcacaatatgcaattcggataaatattactcatatcgtgtgcataaagaaaaaaccggacggcaggtggcggttattgctctgccttaatttttagatataggctataggcttcattttttgaaattcctaatatctcagaggcagtgcgggagagttcttttcctttcatgccgtcatttatcagtttaagtataaccgtttcagcatcgggcaaatccgctcggtgtttttcttttatttcctcagggtcagcgccttttattattagaacaaactcacctttgggaggattgttttcaaaatgttcaactgcgccttctaaagtagttcttatatattcctcatatttttttgttatttccctcgcggcggttatttgacgttcccctccgaatgtttcaagcatatcggcaagggtcgctttgagtttatgcggcgcttcatagaatatcatagttctcgtttcgttctttaaactgaggaggtgatctctgcggctttttttgtttaccgacaaaaatccttcaaaagtaaaccgtcctgttggaagtccggaagccacaagtgcagtggaaaaggcgcatggacccggaagagcttctactttgatttcattttgtacgcaaagcataacgatatcctctcccgggtctgagattccgggcattccggcgtctgtgaccacagctatattacatccgtctaaaagtttttcaattaaatgggcgcctttttcttttttgttatgttcataatagctggttattggcttttttattcccaaatgattcaataacttcatactgacccttgtgtcttcagctgcaatcaaatctacggattcaagtgttttaatagttctcagtgttatatcgtcaagatttccgattggggtcggacataaatataatttacctttcataactttctccttcgcttttatctttttattcggcggttctttcatatattaaattaatttcatcggtatattttgcgcctgtttcttcatatatatataaagggggctccaggacaagttttggccttccgcagtaggttccttctaaaagtatcattgtggcagtttttttataagaaggatgtacaaatctgagtcgtttaggttcaattttatagtttcgcataagtgtaacaaggtctatcaatcgttcaggacgatgtatcatagcaagctttccgccgggcattagcagttcagatgagctttttataatatcctcagcattacacagtatctcgtgcctggcaatcgccgcagaattgtgtttacttataagccctccgccatattctttgtatggaggattgcagactatattattgaaagaactttttccaaatatatcgctggcaaactttaagtctccgcagaccatattaatttttttagataaattatttaggattacagagcgtgatgccatatctgatacatctttttgaatttccaggccgattatttcttctgcggcagatttgtgagataatagtattgaaattataccgttaccggcacacatatccattgttctggaaccggattttatcccttttgaggcgaaatgtgccagcaatactgcgtccacgccaaaacaaaactgatttggattctgtatcagttttaaattatttaaatgaaggtcgtcaattctttcgtttttgtttaataaagtgttattcattgtattttaattccttttttgagttcatagaatattcatatttgcgcgtttatgttcataaaatgttaacatgtgcaaactgtataataaaaattgattttcattgtgcaaaataaacaaaagagtagtttgtttcagaaatataacaaaataaaatcaacgcaaattcggtgtttacgaaagctttatcttaaaatatttcttaatattacaactctgttacatttgtgttacaatgcaaaaaatgagttttttcgctataatttcctgatataatgccataaaaatagtataacagaaaagtggattgagcacaataaccaaaattggcaatcgtcaggaaaaaagaagagtaaataaaagaaaaaagctaaaattattagaatataagagaaaacatttgattttgtgccggtgctggatttaaacttgacttagacgatttgagacaattttgaaggtttgacggattttctaagtcaatatataatagccagcgtgacagagataaggaatattgttttattccaaaaatttatttgaggtgattcgatgtttacaagactgatgagaaagttacacttatcagccaaaaattgtgcagcagctgctttatgttcaacttttattgtggcaacatgctgtagttttgcatatgcaactccgagtaccgttacgatttgtgacggagacaatactccgattacggtaaaaacaagtgataccagcgttggtaaagttttagcaaagcaaggtatatcacttaatgagggcgacgaaacaaatgttgctttaaatgatacggtttcaaataattcagtaattcagattaacagagctataccggttagagttactataaacggtgttactaacgagtatagcacaacaaaaaagcttgtttcagatgttcttgctgatgttggcgttgaggcttccgatgatgaggtcacaccaagaatgacagatgttattgaagccggtgacgaaatcattgtaaaccaggaagagagccagatagtaacagtatctgaaagaatctcgtatcaaacagaagaagttgaaaatgtgaatttagctccgggtcagagagttgttacaagagaaggctctgacggagaaagagaaatcacatataagatttattatcaggacggcgctgagatatcaagagaaagaatcggtgaaattgtattagcagagccggtaaatgagatagttgaatattcaccgcaggaagaatttgaagttggaaaaatacctgcttctagacctacaaattattcaagagtagaaacatttacagcgacagcatatgacgcgtcttatgaagacaacggtccttgggccggcgttacatcaacaggtatgcctatgggatatggtgtaatcgcagttgacccgacggttattccttacggaacaaagatgtatattgagtctgctgatggaaaatatatttatggttacgccattgcaggagactgcggcggagctataaaaggcaagagagtagatttattctactggtctaaggctcagtgtaatgagtttggaagacgcgcagtaaatatttatttcttagattaataaaacatgaccgcctaagcttaggcggtctttttattttgattacaaaacctgaatattacttgacctttaatactaaaagtgttatcattatataaatttattgatggaggtatgacttatgtctaattattcaaaccaggataaaatacttgaaatactgcacaacgactgcagactgcccttagaagagatttcggtaatgaccggaatcgccgcacaagaagtcgccgccatcatcgacgatttagaaaaagacggtactattttaggttatggcgctaaaattaattgggataaagcggcaggcccggattctgttaccgcttatatagagcttcgcgttactccgcagagaaaccagggttttgatagaatagctgagagaatataccaatatcctgaggttaaatccgtcaaccttatgagcggaagttatgattttggaattactgttgaaggttctaatataaaagaaatttcgctttttgtgtcgcagcatttggctcctatggaatctgtagttggaaccgccactcattttgtcttaaaacgctataaatttgacggtatagtatgctcgcagccggagaaggatgaaagggaggtaatatccctatgagttttaatcctgaaaaaatgataaataaaacggtaagcagtatgccgccgtccggtataagacgtttttttgacgttgcggccgagatggaggactgcatatctttaggagttggagagcctgactttgtcactccgtggcatattagggacgagggaatttattctctggaaaagggacatacgcattatacttcaaattcgggattaaaagaacttagggttgaaatctgcaactatatgaaacgcagattttctttgaattataatcctgatgaccaggttgtggttactgtcggcggaagtgaggctatcgacctttttatacgttctatagttgagccgggcgatgaaattttggtatgtgagcctagctttgtgtgttacaaacctatagtatcattagccggaggaataccggtggttatagagacaaaggcagagaatgattttagattgacgcctgaggagctaaaatcggctataacagacagaaccagggccgttgtgcttccgtttccaaacaacccaaccggagctgttatgactaaggaagaccttgaaggaatagctgacgttttaagaggaacagatataatggtcttatcagatgaaatatatgctgaacttacatatggtgataaaagacatgtatctattgctgaaattgacggtatgtatgaaagaactgttgttgtcagcggtttttcaaaagcgtatgctatgacaggttggcggcttggatacgcggtaggtcatccggccttgataaaagctatgacaaaggttcatcagtatgcgataatgtctgcgcctacaaccgctcagtatgccgcaatagaggcgttaaaaaacggtgacagtgacatagaaacgatgagggatgaatataattaccgcagacaggttatagtcgcaggttttaacaagctagggcttagctgttttgagccgaagggcgcgttttattgtttcccatgcattaagagcacaggtatggattcaaatactttctgcgaaaacttattatacagcaagagactcgctgtagtgccgggcactgcatttggcgagagcggagaaggctttattaggtgttcatatgcttattcaataaaaaatataaatgaggctttaagcagaacagaagcatttttgaaagaaattaaaagatgattttccatactaaaattatggattattcgaaatgtactgtgataaaaataaatataaataacaaaactgattccttttaattgaggaatcagtttttgttttattgtgtattttataaaatgctaatttagatttttgtttttatctcgctttcatgggaaagaaatcaaatctcggctcaagaaattttaatctgtgttctgtttcgccgttagcttttgctaaatctgtaagggtgtcaaaaacatgctcccagttccatatgtctttgccaaatcctaaatattcacagagcagttcagtaccttttggagcgacagggtgcattagcaccatagcggtttttaccatatgcaaggtatctatcagcacttggtttctcttttccgtatcagcttccgcgtctttaatgttttttgcccaaaacttgtttgcgtctcttatatatgtgtccattaggttcataactgtgtggaactcaaacttatacatagcgtgttcatattttaatatggtctcttttgcagcgtgcagcacttcttcggaaacctgacccataggcataattggttctccgtatttttgaatggtataaaagcatgagcgcgctactctgttaaaaacattagataacattttgccttcacgctcaaccggatccgcgtctttttcgccggccgcaggattaagaggctttggctggaagctaacgctttttaagcttagtcctaaacctaaaaaatgcgctctcagctgttccgcagtataatactccagcaaatcctcagccattggaggcttaatatctccgctgctgcttgcttttttgttaagaaacaaaatatggttgttggcaacaagcgtggggagcgtatactgtccgtcagacgggaatgctgtcagattttccttgccttgaagcgctatgaacattgccatttcagctattccgtaaaaatatatattatcttgaccaatgaactggaacacttcagaatccgtgcttttccaatatttttcccattcatcttcgggttttccctgctgttttaaatatgtctttgtaaacgaaatcggcgcccataatgattcgggccatacccaaattgtcagcccatcttcgccatccagtacaggagctggaacgccccattcgatgttgcctgtaaggcggaacggaaccaaagttttgccggcgcggaaccggatattattgtcgcttaacagttcttttgctttgtcgcggtcattcaaatttttaaattcgatagaaaatgaggtcttgttgtcctccaaattcagaatatgctccggcatttgtgacttgattgcagtgtattcgtctataaagtcttttttaatgtaaatcatcggaggaagcataaattcttttattgtgttgtatacaagcggccgtgaattgcctttttcaggaaggctgtcaacatattcgttcatcagttcattaaactttgttatgtcaatgtaccaattcacaacgtcacgcatttcaggagtttcgcctgttaatgtgcttttggggttaatcaggtcggccggcatatattggtgccccagcgaacactcgtctgcatatgctttgtcgctctggcatttatcaacaggacattttcctatgacctgtctgccgtttaaaaattgtcctgctttagcatcatagaattgagaggttaccatcttttcaagatgtccgttttcgtaccattgatgcattaattcactgcttacgtcagcatgtacatctttggactctccaagtcctgaagcggcaaagagatttaagcttatatcatatttgccaagaacttctttctgactttcatggtttattctgacaaaatcctcaatgcttccgtcgaatttccctgtttcgcaaagttttctgtaactttcaacaataggtgagccgtaacagtcagtacctgaaacaaatataacgttctcttctccaatacggtcgcgcagaaaacgcgcaaaacagtctgcctgaacaaatacgccgcctacatgtccaaaatgaagttttttgttgccgtaaggcatacctcctgtcacaactgcccttttgggaaatgatggtctaggtaggtcaaatacacttatttttttaggtctgtactgctcattattttgattgtttttacccatgttttttctccttctatataaaaacagaatcttttgtagtttatattttaacctgcaatagccaaattaatccttcttgtcatttcgtcttcgccgattatttgacatatctcccaaaggtcgggcgagttagtgcgtcctgttatagctacacgtataactccgctgacgtcgctgacgctgcccttatacatatcgggattttttttgaaatcttttggtttcacggcataacccattgattcggtaatatctctgattttttgaaaccattcggaattgtcgtcttttatattaaacgaggttaaatattgttttagaattttatatcggtcttccttagataccctttcaggaaattcatcttcaactttaaacgtttcagggaagtagaatgagaagaaatcgcgtgcctgtttccagcttgtcaggtcttttctcggcctgtttccgtttctgccaacgtctatgattttttcagaataatttttgtctcgggtaaacagcttataaaattcagggtcatattctttgagccaatcagaaaattcgtcataaatcttatttgccggcgttctaagaagaacctctcggctgacatcctcgaatttcataatatcaaacagcgctcccgaattgctcattttgtctaaactaaatttaaagtcatcaatcggggcgtcgggattttctaatctccactcttcaaaattggaatttaaaacagtcatgagatattcccaaacggctctcggcgcatatccttcacttcggtaatattcgagaccaagctcagggtcttttctctttgaaagttttctttttgtgtcaccgtccattttcatcagaaccgctgtgtggcagtatataggtctgtcaaagcctaaggcgtcaaataactgaacgtgtatcggcagagttgaaagccattcctcgcctcttaccacatgggttgttctcattaaatgatcgtctataacatgagcgaaatgataagttggtataccatcggatttgagcagaacaaaatcctgatagttttcagaaacgttcagcattcctcgaatcccgtcatatacttcaacgtggttattttcgtctccgtttgacttaaatctcagaacatatttatcgccgttttcaatccgtttcttaatatcatctatagaaaggtcacggcactttgcccatttaccgtaatatccgaaattgagcttgtccgaaatctgttgctcgcgcatttttgaaaggtcgtcctccgaacagaaacaagggtacgccatacccttcttaaccagctctttggcgtagcattgataaacttcttttcttaaacgctggcggtatggtccataagctccattatcaccgtcgacagaggcgccctcgtcaaagtgaataccaaaaaagtccatagctgatataaccagctcaactgcgccttcaacctcgcgtttggcgtctgtatcctcaattctgagaaagaacgtgccgccgttttgatgagcgagtctctctcctattattgcgttgtatagattacctaaatgcacaaatcctgtggggcttgggcctatacgcgtgaccggcgcgccttccggaaggctgcgtttgggatatttttcttcataatattcaggtgttttatcaataccgccgaaaagaagttcggcaagctgctcatttttattcattacaaaatctcctaaaccaattaataatataataccaagtattttactattttttcctaaataagtcaagtattcgctggttttattatatggttgatttcagaagtttcatacttaaaaaatctgtgcgagcagtactgacataaccattccgcacaaatccgcacttagcgcggcaaataacgtgtagcgtatattttttattccaacgcttccaaagtatacagctattgtataaaaagtggtttcagtagagcccatcattattgacgctattttgccctgcatagagtcaggtcccaggtgttcaaatatatcagttaccgtagccagcgccgcactgccggaaatcggtcttaaaaaactaagcggaactacttccggcggcatatgtatcaggttggtaacaggagagattgcgttggtgattagttcaagacatccgctttcacggaacatagctattgccaccataagtcctataagtgacggaactatgttaaatgtggattcaagccccattttggctccggatacaaagcaatcatagatatcaaccttttttacaaatccaaaaatcagaaaaataaatataaaaaatgggactgagtacatagatactatttccatagtttatgccccctgtctttttgatgcgtctgaaatagtttggcgacagtgattccaacagccagcgcacataattcacatatccaaataggcagaatgacctcgcctgggtttgccgagccatagctttgacgaagtgatattagggtagttggtatcagctgcaaagaggctgtgtttaataccacaaacatacacatttcatcagtggcggattttttgcatttgttaagcttatccagttctcctacagctttgattcctaagggagttgccgcgttgcccattccgagcaggtttgctaccacattcataaccacgcttccgaacgcgcttgattttgggtcaagttttggaaatataaattttaatattggatttaaggctttggctataatttttattaagccgccttcttcacctattttagatatacctgtccatagacacattatacctaaaagtgaaatgcaaagagtgacagcgtctccggctccgctgacagccgccgccgcggtctgctcaacccgtccggtaaataccgatactataagtgatattattatcattccgccccatatgtagttcatcataagcattacctctcttgtatagtgcgatagaattattgttttgtaatataagttttactaaattgtaaacagcattcttcatgattctccataaatattggccgaatgtatgtataatactgtatggtaatatttgtaaataaatgttttgaccatagtatttaagggaaacacgaaaattttgtcacttaggcaactcgtatatattgtataatatattggctcagtgcactatatattccggttttgatttgattataaacctctcttttcgacaaaatacgattatattgtccacttttcaaaatcgttaaaattattataaaaaacgcttgcataaagcaagggcttgtagtagaatatacgtggtgggggaaagtgtactaaagtgtattgatatgccgtgaaagtggtacgaaatgacttaagtgtggagcacattgccctaaaaccaaaaaaagttggttgaaaggaggcggcaaaatgttaataggtgaatatatgcaaactgtggacgctaagttcagggttaacattccatctaagtttagaaccgatttgggtcagacttttgtcgtcgctaaaggaatcaactgtatttcgatatatccgaaagatgaatggatacggtttttggaaagtttgaaagatatgaaaaaacttaggtttttctctgccggttcaagcgagtgtgaacttgatacgcagggaaggatagttgttccggtcagtcttcgtgaatatattggtcttcagaaagaaatagcggttataggtgcgttcaagcatgttgagatatggaatagggataagtggtcggagtattttgacgacgacgcttataaggccgaaaatatagagtcaattatggagcaggaagattttatatagaaatttgaacgcagaggaagcttctatgaaatttaatcatatttcagttttgttgaatgaaagcgttgaagcgctgaacgtaaagcctgaaggagtgtatcttgacggcacgcttggcggcggcggacattcgtctcttatatgtgaaaaacttggcgaatccggaactcttatcggtattgaccgagatactgccgcacttaatgcagccggtaaaaaacttgaaaaatataagtgcaggaaattaactgttcacgataatttttttaatgtaaaaaatattttagaaagtcttaaaatccctaatattgatggagcaattctagatttgggcgtgtcatctccgcagcttgatgaggcagaacgcggattcagctataattccgatgcacggcttgatatgagaatgaacagggacgacaaactgacggcatatgatgttgttaacaattatacttttgatgaactgaaacaattgctgttcaggtttggagaggaaaagaatgcctcaaaaatagccgctaatatagtgaaagaaagagaaagaaagacaatagaaacaacgcgggagctaagtgaaattataaagaggtcatttcctccgaaaaaaaggtatggggacaagcatcctgccaagagaagttttcaggctattagaatagaggtcaatcatgaacttgatggtctgaaagaagcaatttgtgattttatagaatgtttgaagccgggcggacgtttggctgtgataacctttcattcgctggaggatagaattgtaaagactgcttttgcagaattggccagaggatgtacctgcccgaaagaatttccggtttgtgtttgcggaaactcgccgaagataaagataataaacagaaaaccaatagttgccggaaaagatgaacttgaaaaaaataacagagcccatagtgcaaaattacgaatagcagaaaaaatataatcgaatgttaaaaagtttaattgaaagggatggtaaagtgcctgagaaacaaaagacagcatatagaagacaagcacctttgtcgcaaagcaggaattaccgggcggaaacaagaggcacttcatcatatggcggtgcttatggtgctccgcgttatcaggagaacatgaattataggtatcccggaataaacagcactgaaatcagaaacactcagtatgcaggtacagaaagactaagaacaggcagttatgagagcagaaaatcttatagagcccaaagcggtgtatatcaggaaaagagaccgagttcgaatcggagaggtaattcaactgttaatattcaggataaatcatatatgagggggtattatccacctgtgtatacggctccgtcagaaaggcctatggcaaacggaatgcggacatcatcagtttccgtttatgaaaggccgctgggatataccggcggaaccacggtgactgttccgggcagagaggttcagagaaaaattctgacccgtgaggagcggttagaaaataaaagaaaattaaaggctcgtgtattatctattttaggcatagcagtgatatttttaatgtgtgtgctgatgctttacagacagagtgcaatatttggtaaaaatcaggaaatagaaacgttgaattcagaatatagtaaaattcttgtcacaaacgaaggaatacagtcaagtatagataaatcaattgaactgggaaaccttgaatcagtcgctaaaaatcaactgggaatggttaatccggattcgtctcagatattttatatagatatgggaataaaggatgaagtagttaaatcttcttcttcaaaataaaatgaaatacaaaatgggtataaaagttattaaaatatgttctattttataattttatataataaactttccacaaagaacggcggcctaaatttggtcgccttgttgtaattaatggaggaataaatatggcagagcataagggtaaaaaaaagggcgggaaagttaccaggcttatgactgtattaatagtattttcagtgatgtttatagcactgatatttcgcgtcggctggcttcagacggttagggggaaggacttgtcaagacaggctttagaccagcagacaagtgataatacggtcagcgccaaacgcggaaatatatatgacaggaactataaagtgcttgcaaccaacactacggttgagactataagtataactcctgaaacgctgcgtacatctatcagtaaaaaaaatatgactattgatgaggttgctcagagatttgccgatattttggaacttgaaaaagacgcggtaaaggataaaatatcaaaaaagattcaaaatgagactttaaagaaaaaagtggataagacggttgccgacacccttagagagtatgtaaatgcttcgggactcagcggtgtagctttcacagaggacgttaaacgatactatccgtataataattttgcagcgcaggttattggtttctgcggtacggacaatcagggccttgaaggtgttgagagtatttacgatgaagaactcagcggtgtgccgggaagggtagtgtcggctcaaaaatcaaccggtcttgaggataataacggatatgagaattatatagctgctcaggatggaaatagtgttgttttgactattgacgaaacaatacagagctatgttcagaaaaatttagaagccgcagccgcagataataaagttaacgagggagcggcggctattgtaatggatgttaacacaggcgaaatacttgctatgtgtacagagccggattataatcttaatgctccgtttgaaataacagaagcaatcgaacaaaaatatccgggtataaaagaagaacttgaaaatttagacgggcaggaatataatgcgaagctgggagaagtaatgcagacggttaggcgtaacaaagcggtagtcgattcttatgaaccgggttccacttttaagtctgttgtcgcttcgatagctttagacactggttcatgtacactgaatgactcgttcacctgcggcggttcatttgtggttgcggacagagcaataaaatgcgccaatactaacggtcatggattgcaaaactttactcaggcagtacaaaactcgtgtaaccctgcttttatacaaattggtcaaaagacaggaaaagaaaagtttttgacaggtgttgaggcattcggattctttaagaaaaccggaatagagattcccggtgaagcaacgggtcttggatttacaaaagacaatatgacagatgtcgatttggcaacatcgtcattcggacagtctataacagtaacgcctcttcaaatggtagctgcagtcagtgctgtcgctaacggcggaacattaatgaaacctcatatagtaaaacaaatagttaattccgatatgggaatagttgagaacaccgagcctgaaatggtaagacaggtgatttcaaaagaaacaagtaaagaaatgtgcagtatacttgaatcagttgtatcagtcggcggaggtaaaaatgcgtatctagcaggatatagaatagcaggaaagaccggtacgtcagagaaatacccccgcggaaacagtaagtatgtagcgtcatttatagggtttgctccggcggatgaccctcaggttgtttgtcttgtaattttggatgagccaaatggcgattcatattatggcggtactattgcggcaccggtagttcgcgatattctgggcgaaacattgcagtatttgggggttgagccgaaatataacagttctgaggaagaatatgttgatgttgaaattcccgatgttacaggaatgagtaagtctgacgcagggatagcaattgatgagagcggccttgaggttaagttcagcggcgagagtgaccttatagttgaccaaataccaaaagcgcacactagagtgactcagggaagcacagttgttttgtataccgagggcaataaggcaactcgttctgttgcggtgccgaatgttgtaggaaagacgccggcggaagcaaattcaactttagtcagcgagggtttgaacgcaaaaatcaaaggagtttcaaaatcgggtaaaaatgcaacgtgtatcggtcaatcaccggttgaaggaactatggtagaacccggaacagtggtttcgcttaactttagatatgatgaatctgagactacaaatgattaaaatttataattttaaggtttatttttggcatgaattataaaaaagtgatttaatcattttggaggttaaaataaaattttatataatttgtttaggcaaaaaagcgtttatagcaaagggtgctgaggtataaaatctcaataagataataatgcagagtttgccggctaaatatgcaaatatatacacaaatcaaacaaaagtgtaacaaaataatttatttataaaataagagtaatttatggcaaacaacggcagggcggtcaaagaccgccgggtaaggtgagcagctgcaaataagcagatatattaaaataaatctaaaaaaacatagcaaggtaattgccagcaaaataaaaatagagataaaataagagtaatttatggcaaacaacggcaggacggtcaaagaccgccgcgcaaggtgcgcagccgcaaataagcagatatattaaaataaatcaaaaaaacataacaaggtaattgccaacaaaataaaaataacgcaaaaaaagtgatttatagcaaacaacggcagggcggtcgaagaccgccacgtaaggtgcgcagctgcaaataagcagatatattaaaataaatcaaaaaaacataacaaggtaattgccaacaaaataaaaatagcgctaaaataagagtaatttatagcaaacaacggtagggcggtcaaagaccgccacgtaaggtgcgcagccgcaaacaagcaaagaaatttacataaatttctactaaatcataataactaattgactttttatttatattagctatataatataaataactataatcaacattataacagtaaaataatcacaaaaagtgtgcgccataaaatatattttatataaattataagtaatcatatttaatcaaaaagattatgtaatgggataaagcgaaaaatacataattctaaaggttctaataaatatttataaattaaaaatctaagcttataacttttacaaataaattgagttttaaaagtatatagtagaataagaaaagttttattgatattacacaggaggaataataatgacactttcagaattgttgaaggatgtaaatattaaaaaaatagatggcggcggaagcatgaaaataagcggtatagcctgtgattccagaaaagtaaaacctggaaacgtttttgtttgcataacaggttatgagactgatggacataaatatgctaagtctgctgttgaaaacggtgcggtggctgtggtagccgaacatgaccttcctacagttgacgtcccctgtgttatcgttgacaacacaagaaaggctatgtctgaaatggcggcaactttttatgattatccttataaaaagtttaagcttataggaataaccggaacaaacggaaaaactacgactacttatttgattaaatcaattcttgaacatcttggaaagaaagttgggcttatcggcacaaatcaaaatatgataggcgatatgataatggaaacctcaagaacaacgccagactctttggagttgatgcagctgtttgatatgattgcctctcataatgtggattatgttgtgatggaagtttcttctcatgcgctggctcttgacagagtgacggcgtgtacgtttgatgtaggggcgtttaccaatataacccaggaccatttagattttcataagactatggaggaatatttggcggcaaaaagcatattgtttaatatttgcaataccggcgtagtcaataaagatgacgcccgcagcgaatatcttattgaaaatgcaaggtgccggaatatgataacatacggtataaatcaggattgtgatttaaaagcgtctaatataattctgaatgaagacggtgtaaaatttgatataaattacggtggtatggaagaacacgtcgacttgccgatacccggtgaattttcggtatataacgcgcttacagcgataggctgctgcatggctgagaacatacctcttgatttggctgttgacggtcttcatagtgctaaaggcgttaagggaagaatagaaatagtaagaacgccgggtacaaattatacagttataattgattatgcgcacactccggacggacttttgaatgttataaacgccatacgtggatttgcaaaaggacgaatagtcacactatttgggtgcggcggtgacagggacgcctcaaaaagaccaataatgggcaagatagcaggagaactctcggatttttgtatagttacaagtgataacccgagaactgaggatcctgaaaagataataaagcaggtagttgaaggagtaaaacagacagactgtgattacgaggttataacaaatagattctccgcaattgaatatgcacttgaccacgcgaaaaaaaatgatataatattattggccggtaaaggtcatgagacttaccaggttttaggaaaagatactataaagtttgatgaaagggaaatagttcaaaaacttttagggtgttacgataaataataacaagctgttttaacggcaatattgtaacaaaatattatgaatttgattgtgattgtgtggaagtcagtggattactaaggagatagttttatgaaatggtgtatgaatatcaacaaacttgctgaaatcaccggaggaatagcttacaattgcagcggagatgagatagttaaaaacgtagtcagagatgacagagaagtatccgacggaactgtttttgttgctcttaaaggagaaaataataacggtcatagatttgttcagagagccgtaaataacggtgctgcatgctgtgtggttgacaaagaggaaggaagcttcggaaatcttcctgttgttgctgtagacgacacattcaaagcgctgagagatatagcggcgttttatagagaacaatttaatattccggtagtcggaatcacaggaagcgttggaaagacttcaacaaaaggtatgatagcctctgtattgggcaacgaatatgttacgctgaagacggagggtaattataataatgaggtcggagttccgcttactatttttagacttacggataacgacgaagcggcagttatagaaatgggtatgagcgcttttggtgaaatttcaaggctttctaaaatagttaagccggatactgcggtaatcaccaatattggtatttcacatatggaacatttgggcagtcaagagggaatatgcaaggctaaatttgagattcttgatggtttgtctatagacggaaccattatcttgaatggagacgatgaatttctctgggagaaaaatggagagctggattatgaaaccttatattatggtatagaaaataaatcctgtgacgttgtagcgacggatataaaattatactcgtgcggcagtgagtttaacgtaaaaatagatggtgttgactataaatttgagactaatgcaccaggtatacatcatatatataatgcgctggccgcgatacttgtaggatataggtataaccttaaagtggaaagcatgataaagggagttcacgattttgtgccggagggattaagacaagttaagacaaattatcctaagtttacagtaataaatgattgttataacgcatgccctgattctatgggctccgggcttgacgttttggttttaacggctgaagaaaacggcggaaacagcagaaaagttgcttgtttggctgatatgctggagcttggagagacttcggcgcaggaacattataaagtgggtctgatgtgcgccgagaaggggattgactgtttgataacaataggcgatatggccggaaacatagccaaaggcgcaatagacggcggtattaactcaagcgatgtatatgaattcggagataacgaatcggctatatcgcgtcttggaggaataataaaaaataatgatgttatatggataaaaggctcaagaggtatgcatcttgagaaagttgcggaagcgcttgataagatgggaaattcatagtattgagagctaaaactgttttgattggagagggtaattatgaattacttgatttggggagttatagcattagtattgtcagtattatttggaatatttataataccaatgctgaggagattaaaattcggtcaggaaatacgtgaggaaggcccggcgtggcatgcaagcaaatcagggacgccgacaatgggcggaataatatttattttgagtattattgtaaccctcgttgcaatgtttgtttggacagcgtccgacgggatttctatgggaaatacagtggatttagttttggtaattttactttcactggcatttggagctataggatttattgatgattacataaaagtggtaaaaaagagaaatttaggccttaccgccgcccagaaatttagtcttcagttcgttgctgctctgattttcgctactgttgtggcgattgggggaagtaccggaacggtgattgaccttccgtttacttcggtggattttgatctgagctggttttacataccatttgtgatttttgtaatgcttgcaaccgttaacagtgtgaatttaacagatgggcttgatggtttagcgacttctataacaattgttatttcaatattttatatgctgatttctacaagtatgggcaatcatgctatgtcgttgctggcagtagttttgtgtggttctttggtaggatttttgctttttaactggaaaccggcaaaagtttttatgggtgatacaggttcattgtttttgggcggcgctgtgtgcggtcttgctataatgctgaaacagcctataacgcttttaattgttggatttgtgtatgttatggaaacgttgtcagtaattatgcaggtaacgtcatataaactgaccggaaagcgtatatttaaaatgtcaccaatacatcatcattttgaaatgtgcgggtggagtgaagtaacaattgtgtgtgtattctcagcagtgacggttttgctttgcgcgctgatgtattattttggttaattttatttatgtgcagataggaggagtatcgacttgtcagatgaaagaaatccgagaaaaaaagccggaaacaataatataggccggcgtgcttcaagtaaatatagtaaaacgccgagaaactccgaaaatagaaacaacggacattattataaaagcatcagtcataatgaacctgtgcaaaacagagcgcagagcaaacattatgagagcagttacataaaaaaaacacagagcaggatacaggagccggttagaacgcaagttcctcgccgggaaaccgcgtcaaaaaatcaaggagtaaaatatactgctaaaaactttctcagggtaggcggaataaaaataagacgcggcgcgctcgattatcagtttttattgacaacgattatcttggttgcgtttggtatgattatgctgtatagtgccagcagttcaagggcctatgctgctaccggcgacagtatgtattttatgaaaagtcagtttggcggacttctagtaggtatagtggctatgattggctgtatgatggtggattatcatgttattgccaggttgtctccggtattgtatgcaatatgtattattcttttgatattggtattaatccccggagtgggaacaacctcaaacggagctacccgttggctgtttggttttcagccgtcagaaatagtaaaatttgcaacattactggttgtagctgtatatttggaaaaataccaggataaattgggtaacttcttccgaggatttttgccttgccttttgattttaggagtagtcggagcgctgctcatgatggagccgcatttcagcgctactatattgataacccttacaacattgcttatgatgtatgtgggcggagcgaaaataagacactttattattttggctattcctgcgtttattggcggagtggcaatgatatttgccgagccttacagactgcagagactgctgtctttcggtgatccgtttgccgataagcaaggagccggctggcagattgttcagtctctttatgccattggttcaggcggtgtgttcggcgttggatttggacagagcagacagaaatacatgtctctgccggaaccgcataatgactttattttctcagtattgtcagaagaattaggttgggtaggagctatagtggttatagttttatttctgttccttatatacagagggatacgtatagctcagaaggctccggacactttggggaaacttattgttattggatgtataggtctgataggatttcaggcgatgataaatatcggcgttgttacagcgtcgcttcccgtaacgggaatgccgcttcctttctttagttacggaggaacagcgctggctataactatgggtgaaatcggcttggtgcttaacgtctccaggcaggagaaggtgttataatgagaattttatttgctggcggcggcaccgcaggtcatattaatcctgctgtcgctatcgccaattatattgctgataaggaaagctcccaaatagccttcgttggagttgaggaagggcttgaggcggagcttattccacgtttgggatatgatttgtcacttataaagatacatggttttgaaagaaagcttaactttcagaatttcaaaaatttatttgaacttcctaaaagtattcatgattcaaaaaaaattataaagaagtttaatcctgacatagttatcggcaccggaggatatgtcgcagggcctgtgttatttgcggcggcaaaacttggtataccgacgcttatacacgagtcaaacgcatatccaggagtaactacaaaaattttgtctaaatatgtcgacacagttgctcttggttcaaaagccgccgagccatacataaaatcagctaaacatataatttactcgggtaatcctgttcgtccgtctatattatctacaagcgagtttgaggcccgccgcgtcttaaagcttgacgagcgtccgtttatagtcttttttggcggcagtatgggagctaaagattttaataagacagtggttgattggataagcggtgttataaaagataataagtatcaaatcatgatgggtaccggaaaatattttcaatatgatgatgttattgaaagatttaagaacaatggtatcgacctgaagaaataccgaagcgttagagtaagcgaatatatttatgatatgaatgttgtaatgtcggccgctgatttagttgtctgccgggccggggcgagcacactgagcgaattaactgcattgggaaaaccttcaatacttgtgccgtctccatatgttactgccaatcatcaggaacataatgccagggcaatagaaaaagaaggcggagcaagagttatattggaaaatgaatttactgctgaagttcttaataaaaatatagaaagtcttgtaagcagtaaagaaaagcttaaaaatatgagaagagccgctaaaagtgttggcactacagcggcaacagaagaaatttatcgtgaagcgaaacgtttgctgaagaataattagtatattcaataaccgcttttcacaaaccgtccttgactgcatactatattgtgaaagaatattaatgtagccagatggaggagattttggtgaccgacggttatttatctataaacggaagaaggcgtctttttggagagacctcagttcagggttcaaagaactcagctctgccatgtctgaccgcctgttgtatgtgtgagaaagggtgctgtaatttatgcagatgtccttacctttcagatgttgaaaatactttggagataatggagacgctagggtgccgatgtaattatgattctgaacgcgaattagcaaatatttcggcggagagtattttcggaagcacaatagagcctgaaatgatgaacaggatgcgttcttcaatattgtttctgggagttcttctgtctcgaatcggagaggcggacgttggttatcccggaggctgtgaattgggagcaagaccaattgatttgcatttaaaggcttttagaaagctgggagtacagatagaggaaagtcagggagttatacactgcagaataaaatctaaacttaaaccgtgttctgtatcgctgttatgccccagtgttggagcaaccgaaaatataatgctgcttatggcaaagtcggatggtgagacagttataagaaatgcggcaagagaacccgaaattgtggaccttcaagattttctgaatcttatgggagcggacataaaaggcgccggcagtgacgttattgttataaatggtgtaaaaaaacttcatggcgctgattttgaaataatgccggatagaattgttgcagttacatatatggccgctgttgcaggctgcggaggagagatactgttaaagggaatcaacttggagcattcttcaatgtgcaattcaattttaaaggatataggtgcagatataagaaaaaccggcgatggagccataatatctatgagcggccgtcccagggcggttaacaccattaaaactttatactatccgggatttccaactgatgcgcagccgccgtttatggctgttatgacggttgcggacggtactacggtgttcttagaatcaatttttgaaaatcgtttcagacatgcgtctgagctggcaaagctgggtgctgatattgatgtaaacatgtgtcaggcaaccgttaggggacgggagtttctaagcggtgcggatgtcaggtcatatgatttgagaggcgccgcggctatggtaataggcggattaatggcggaaggcacgacgagagtcggaggactgccgcatattgaaagaggatatcaggatatagtcagtgatttggaatctttgggtgctgacattcgtattgtatactaaactggagagccgttataggagaatatcatgcaaaagaaaagaaacattaaaaagagcagaatagacattgaaaaagcaagggcaagacggaaactaacagctatatctgtgctgtcagtagttgttttagcagttcttgccctttgttttttgcttatggcaccaatgtttaatataaaaaatatagtttgcgagggtaatgacaaaataagttatgataccattgttgatgcctcacaaattaaaacgggcggaaatatttttttgacaaatctgagttctccgaaaaaaaatgttgaatctttagagtatgtggaggattgtcaggtaagccgtgtttttcccgatactgttaaatttacaattactgaaagacagctggcggcttatttcagcatcggagattttcttactgttacagacacaaacgggcgggttgttgacaccgttactaacaatgatgatgtgtatcaaataacatcgtctaaaataaaagaggagatagttgaacccaccggcagtccggaacctgaagaagaggatacaaaaactgaggacgattccatttggggctacgatgatgacggagacccaatatacaaggtgaacggcggtcattacgagtttgacaatgacggcaatagatattttgttgatgattcacccaccagttctccggcggcagagaattcagaggagccaactgaattggaatcaggaaataattttgatgaattgaaccggacttcaaatggtgaaattatttacaacgctccgataatatatggagttggaataacaaaatatcaagttggacataggattcaaagtaatgatgaggacaagctggacaatgttatagaagctgtaaagtctttatcaaaaacgggacttttggaaagaaccaccaaaatagatgtaaataacataaatgatgtgaagttttgggtcgaagacagactggaagtatggtttggtacattcgataactttgattataaagtgaaattcgtaacttctgttattgacagtaacctatcaaagtatgaagaatcgatactggatttcagggattcaaaactgtatgtacgcagtattgaaacaggagaacctaaagtgctggaagttagtccggagccggatagtgatgaagaggattcaaaatcttcggcaaaaccgaaagcgtctcctattccgacagatgatgaggatgatgaaggtttagcggatgatgaagagcaggatgaagaaaatcccacatcaactccgaaaagtgataattctaaaaacgaatcaaaacatactcctactccaaagactcagagaaattgatagtcagtacagatttgagttagacagcattggtatggtattggtaaaaggtataaaagacaagggcgatattaaaaataatccaccgttagaagaagcgtttaatttaggtaagtgtttaatttagcaaaatccaatttgagagaccaatccatttcgctttttcgggataggagcatatacttttaagctgtttttaataccggcaagcaggacaaagcggttataatttgcaaaaaaaataggacttcattttgtttggagcggattccgaatgttagaccaagaatctaacaattggggttagctcacttaattgaagtcctatttttgttcgctttaacaatgaagtgaaaacagtgcctaagatttgaaaattacaaattctttaaaaatattttatacagtcttttgtatataagactatattcatttataagtctgttataaaatgcgttctctattatataaagcaagctatttgtcctaaatttttaaaatcttttttatagtttgtttatatcttagagaaagtaaaataggttatatataatattagttttggtgtgtgagagttatcttatttttccagccgccatatatgcgggtcttttctaaagattaagcatgtgataagtccgataaatcccagccataaaaacaaaaaagcggctccggcgccttttccttgcccaaataatgtaataaatatgcttgcggctgattgtgacgccatgaacggttcaaacactttgtcaaccaagaatcctcccataaagtaaccgattggtatagtgaaaaactgtaatgtgtttcttgcagaatatactctgccttgcatattaagagggatatggtttctgaaaagaacatccatgtttgcgttcataaacgggatggctatccatcctaaaaatgctccgatacaccaaacgggaacgctttttccaaatgcaaggaaaaagttttctgtgctcattgcaagcagaagagaattgcaaattatacgaacccggcttttgggtgatggaatcagtgatacgagtatgcttcctccaaccattgcgagacctgataccgcattgactattccgagtgcagactcactgccggagcttttggatagaaccatagccggaagcgctgcttcaaaaactgaagcggtaaaatttattgcagccaaaaatagtatgaggtctaaaattccacggttgtgtctcagataccgtattccgcttttggcggattcgagcacggattctgctttagcgttctcagttgatataacttttggtatttttacaaagaacagcagtgataagaaagctattccgaatgtaaataaatcaaacgcaataatcgtttgaatattgctcagcgccagaagtgcggtagatatgacgggagtcataacgtttaccaatgaatttgagaatgctctcataccgctcgccttttgataatgttttttaggtgtgagcagactgatagtaacatctgccgacggttgctgtattgagttcataagaccgtttagtgcattcaaacaatataaatgccatatttgcagtttgccaaacagcagcagaatcaggacagatacagtgcaaacagcagcaaaactgtcgcagacaagcatagttgcttttttattccatttgtcgcttaacgctcctgcaaatatgcttataatgacataaggcgcatatgaacatattgaaagcattgaggtttttaaagcggacccttgctgctgatatgaccatattattaacgcaaaatttgtcattgaactgccgagggttgaaaatgattgtgtgagccacagtataataaacgaatgcagctcatatattaatttttttattttattcatattgactttgctccttttaattttgaaattatctcataaaatgcaaagtcttttagggacattctgttttattgctctatgcggttcgtccctatttgaccttgcatagagcttcagcaatacaaagcttcatttttcctcctaagtatttatttaaaatataaaattttattctaagccgttcattacaaaatccacaagatcctgtgttgaatttggttttgctattgacttcattgcttcctgcataagtttcatccggtcatcgttaacaaacatttgataaaccgcttcatctattggatttgtgctgcttatccgcatggccgctccggcgtttaatagaaactctacgtttctgtcctcctgacccggaatcgggttattaataagcattggtatctgttttgcaagcgcttcgctggtggtaagccctccgggttttgttataatacagtcgcaggcgtccataaacacatcaacgttgttgatatacccataactgtatatttttttccgtgtttccatactgtctatttttgttttaagctttttattgtttccgctgacagatacaatttcaaaatccatatcaagcttatccaattcttcaatttctttatatacagctccaaaccccatacttccgctcataacaagtattgtatgtttactgtggagatttagaatctctttagccttacttttctcaatttttcttgagaatttagtaccgattggtattcccagcggtaaaaacttgttttctggaaagcccttttttattccctggatagtaagcctttcattagcgataatatagtaatcaagcaagctgtcttcccagtaaggatgtatagtgaagtctgttattactccaatagttttagcgttaagatgttctattgatgaaatataagtaaccagcagcgcagcgaatatgtgtgtgcaaataataaaatcaggtttttctttttgaataagttttatcagacttcttgacaaaactgaatttgttattctattcagtccgtgtatgccggcaccggactgtactccgcgtttttcgcacattctatatacgccgccgtagattttaggtatagctttggtggacataagataaatcttatttacagaatctgataaaatcgggtttataaatttgtatacatccagatatttgcattcgacgccgcactcgttgaaacgtttgctgatcaccatggctgtttggttgtgtccttgtcctgctgttatagataatactaaacctttcattggacttcctcctaattttgccggtttgtgtgttttcagtatttatcagggcttatatatttacagctgttccaggtttaagaaaaaatataatccgctcctttattttctttccaaatattgattcaatgccctttgtgtaataatccatttggattttgtatttttcagcttgtttaggcgcataaatggcagaacagttgtcagtcttataatccaataaaactatctcgttgtcttcgataaagaagcagtcggcgacgccttgaacaatgatttgagcgtttttggaatcagaacttactttatctccatatatttctgaagcgcttacaggaaacaagagtttaaattctcttttaagacttccttttaaatatgcgttccgcattcggcagccgatttcagaactgtaaaatttaatgattgaatctttatctattaaagaaatttgactgttggttaaaacattattggcataaagtgatgttatttgttcagttatttgctcttcagactgagtaaactccgggtttatgtgctgcattatgtagtgagtgatagttcctatttcggcggcgtctccgctggaggcagagtggaatgttctgtcggcgatactgcttaaaatcggagtatattcaccatcctgctcggttagactgtcctgcatgcttcttttaatttcactaactgaaagttttaaggggatacgggtcaattcctcattagggtataaataattaaggttgttatacaattcgtcagcgagctctttgcttatgggctcgtctgttggttttgaaatcgatatgttttcattgattgttttttcacagtctattgattctttttgtgataagtttatattttcatccgtataacttatatatttgaattgaatattctgagcttcatcaatttttagctcggatatgtcggattccattacctctctaagttcttctgcgttcttttgcggcaagtatcccaagactatccaatccctgaaaattttgctgttttcaaaatatggactgatgatttctccgcgtgtgttcaaaattggacgtttccagccttttgactggccgggagattcattggtgcaggaaattataagtttttcctttgccctggtcatggctacatataaaagacggatttcttccgcttttgattctttcgcttttttatatttgattaaatctaatgaaagacatgagtgttttatacgtttatctacatcaatatattccattcctataccgtatttttcatcgtaaagaacagaatcaccgccgggtctgccgtaagtagttccggctaaaattacaacaggatattcaagcccctttgacttgtgaactgtggtgattgataccgctgacgatgcgccgttggtgcttttggcttgtcccatacctgaagagctgtcgttaattttgttaagataatctacaaaactgaaaagacctttaaaagcgcgtctctcataatctcccgctctttgaagcaatattttcagattggcctgcctgatatttccgccgctcaatgatccggctaccgctagataatctaggtcatagcatattttatatatgagttcatccgtacccatatattttgaaaaaccgcgcattttatttaaaacatcaaaaaattttttggcttttgtattgtcgttttgcgcggcagttttaacacaataataaaagttgccgtgccggtttaaagttcttatttcggcaagttcatcggctgtaaagccaaagatagggcttctcatgacagcaattaagggtatgtcttgcagtggattgtctattatctctaaaaaacttaaaacagtttttatctcaatagtgtctaggtaaccttcgctgctgtcagaaataaccggtatattatattctcttaatacctgttcgaatataggagctgtattctttgtagagcggagaagaataacaatatcgccatattcaaccggtctttgttctcctgttttcgagtcgtatacatacagtttatcaaacgtcaccaattttgatattctttctgcaactgttcttgcttcaagctcatgtttgttttgaaacgcagtttcgcgcgtgtcagaacccgaagatttgtccagcacgtcagtcattatcagctctgttttataatctgagggatttttaacttccggataatctgcgccgctttgcagccgttcatcttctgtatagtctaattctgctgtagatttagacattacgtttttaaatagatagtttacgctgtctataacattcttgcggcttctgaaattgtctgacagacgtataagatgtccgttgttattttcaccggagtattcggtcagcttattaagaaacaattttggagacgcgtttctaaatccatatatgctttgttttagatctccaaccataaatatgtttctttttcctcctgatataagctgaaataacttgtcttgaatattatttgtgtcttgatattcgtcaacaaatattgctttgtatttattgctcaaagttttacaaaattctgtcggggagccgtcgctcttcattatcagcttaataagctgatgttctaaatcactgaagtcaagtgaggaacgcaaaagtttcagacgcgtatgtctgcgttccagcataagtatgatattttttaacgtttttatccgaggatacagaagacttatagagctgcttaaactatctatgctatcatatgaaaacagtctgttacttttaaattgtttttttgcttcttcccttatatccgctatatttttgaggatttcggcaagatacgcgtcttctttgtcttttttgctgattctgggtttggttaaaaattttatgttttgcctattctctatatattcttcaatattgccgcacttcattatattacgaaacatctctgcttctttttcaaaaaatactgcgtgtgtatgttcttcaggcagttccttttctgatatttcaataattgtattgtaatagtcaagaatttgtcttgttgaattctttatgcagcttagaaatatattttcccactctgtgccggatacagtacctgatttataaacttcaaaatacattttgacagagttgttcagccattttgatggttctgccaggcttcttgaaaacttgtatatattggtgattgcacgtctgagattatcatcattttttattccgccatgacctaaagtgagctccttaaaagatggcaatatgtcaaagcgttcatagtatctttccaaacaatcttctaaggcatctttaagcaaaagttcattttctgcttcgccgattagagagaaaccggccgggatatttgttagatgaatgttattgctgattattttttgggcaaacgaatggatggtggaaacatcggctgcggcaattttggtggtttgagacctgagatgctgattatcaggaatttcttttagctttttttctatagcggctgctattttgtttttcatttccctggctgcggcgttggtgaaagtcaaaacaagaatttcatcaacggaaacaggttcggtagggtctagtatttttctgattatgcgctcaactaaaacagctgtttttccgcttcctgcggctgcagcaacaagaatattctgtttgttttcatatgtaatagcctctttctgagctgcggtccaattcatataatccctccgggtctagtaccccatggtgccttcaagcgattcatcgttttcaatccatttatcaacagggataacttcatattctgtcggtgttcggcgtactattacctcttctataccggcgtttataaccagccttttgcacattgcacagcagtttgcgtcacctacaagctctcctgttttggcgtctctgcctgccaaatatagagtgccgccaatcatatcacggcgtgaggcgcttataatgcagttggcttccgcatgtacgcttcggcacatttcgtatctttcgccccggggaatgttaagcttgtcccgcatgcagaacccgaggtcagagcagttgttccgtcctcttggtgcgcctgtatatcctgtcgatataatctcatcatttctgacaattatagctccgaaattgcgccttagacaagttccgcgttcgataactgtttctgctatatccaaatagtagttcgctttgtcgactctttgcatattatagccctcccaaaaacaaatttatctatattataagttattttttaaaattattcaataggtttatattgactttgttgcataatgtcaatataatataataaagacttcattttattgaagaaactaaagatagaggtaaatatatgaaaatatataagtctaactcggttgaggatactgcgtcagctgccggtgaattggcggctgagcttaaaccgggcgatgttattgctttggttggagatttgggggcaggaaaaaccgctttcgttaagggaatagcaaaatactttcattctaaaaatgatgtattgagtccaacgtatactttggttaacgaatacggcggtgatattccaatatatcattttgacgtataccgtctcgccaaccccgcgcttgatgaatgctactggattgatgagtatttgtttggcaatggtataacaattattgagtgggctgacaatattaaaaatatcttgcccgaagggactatacgggttgaaataaaggcgtatcctgaaaagggtgaagattacagggagataaagatatgttagtgttagggatagacacatgttgtatgccggcgacgtccgcagtgtatgacggagaaaaattggttggagaagctatagttaactgcggtaaaacccactcgcaaaaaataatgcctcaaatagaagctttgctcaattcgctggaactaaaacctgcagatatagattgttttgctgttgcggcaggtcccggttcttttacaggtgtcagaataggaacggcaacgataaaagcgatggcgcatgctgcgggaaaaccgtgcgcagcggtttcaacgcttgaagcgctggccaataacgttccatactttgacgggataatttgcccgattttggatgccaggagaaatcaggtatatactgctgaatttttaggagacggtactctaacgcgtgtttgcgaagataaagccgttagtttagaatctcttttggacgagctgaaaaatttgaaaaaaaaggttttgtttttaggagacggggttttggtttacagagaagaaattttagaatatttaggagataatgcaaaatttgcaaagggaaacaacaatctcaatatggccggctctgtagcggaattagggtatgaggcggcgctttcgggagatacaataagttatgcgaaactcgcgccgaattatataaggctttcgcaagctgagcgtgaacgtttggagagaaaaaccgaaacaaaagaaatttaaaggagaacataagacgtgaaatttaaaagaattttttcagctattttaattttgttaatgagtgcagcaatttgtctttcacctgtattgatttattctgaaaacggaactttttcatcggattcatccactgtcaggacaaataaagaggataattcggacgaagaagataattcagatacaaattctgatgttaaatctgataagaagacaaatgatgacgatgatagggagagcggtaccataaggggaagcaaacctacatcaactccggccgcaaaatcttctaaatctgcttcttcaaaagctacagcaactccggaaccaaaggccgaaccaactaaaaatccgagagtcggcgacggcggaaaaccgattttggctgagcaggaggccgctatattagtaaactgtctgaatggagaagttatgtttgaacaaaattcagacaaacagatttatcctgccagcactactaagataatgaccgctttgctaactttagaagcaatagaccgcggcgagataaatttaaattctgcctttcttataaccccggatatgcttgaagacttacctgccgacggttccagtatgcagcttaaagagggcgaagccatgacggttcaatatctgctcgagggacttatggtggagtccggaaacgacgcagctcaagctttggctgtaattgtttgcggagatgttccaacttttgttgagagaatgaataacaaggctgaggaacttggtcttagcggaactcattatatgaatgttcatgggcttcatgacgaggagcattatacgactgctgcggatttatgtacgttatcaagagaagctatgaaaaataaaacttttaggagtattgttgctatgtcgcaggcaaatattccggcgacagataaagttggggcaagaacgctgataaacacgaacggattgttgtcaactttaaaatatcccaattatttttaccagtatgcgacaggtataaagaccgggcacacgagccaggctgggtattgtttggtgtcttcggcgcagaaaggcgatcttgaggttatcggtgtcgttatgaattgcaagacagaggacgacagacattacgattcaaaaaatatgctggcttatgctattgataattataaggctgtgacagccataacaaaaggagatatggtcggcgagataaaggtgcgtttcggaagcggcacagaccatacaacattatcaaccaacagcaatattatagttacggtgccagaggacacaaattccgaggatttgaagatagagacttctctgcctgaatatatggcggctcctgtaaacgagggggacaagataggaacagttaacgttgttcttaacggagaagttgttgggagcggagacttaatagctgatttttctgtaaagcgtcatccgcttggatttcttatgcagttttttagttatatatggagtttttggttcgtaaaaatattaatagtcattttggctgctgctttagttatatttataatttatatgataattaatataagaagaaatataaagctggctgaaatgcgcagaagaagttcgcgttcaaaacgtcctccaagaagataaagaattaaataacaattaaatagatagaattttaagtaaaatatgaacaaaaaagatgaattgttaacataaaatatcttgcctagtcagttatttcgtggtataatatctcaaatatattttgtatataatgataacggaatatttttatgtttcgaattctatgaaaacccagcgcttggctgttttatcggaggattatttcatgactgaacctataatgacttatatctggacttttatattggctgttatgcctatttcagagataagaggctcaataatttatggcttgtcacaagtcgatcacaactttttgaatattttatttatatacgttttatctgttattgctaattttttacctgttccgtttattctattagcgttccgccctattataaagtggttgaaaaagaccaaattgttgggcaagttcgctacatggcttgaagcaagaacacatagaaaggccggggatatatccagaaaaagctcaaaggcggcggctgttgcgatatatatatttgtttcaataccttttcccacaacgggagcgtggacaggttcaatgattgccgggcttcttgatatgagagcaaaatatgcattgccggcagtgcttttgggaataatgaccagcggagctataatgactttgcttgttaccggcgctcttaatttaggttcgttcggcgaatggcttacacattaaaaccgtttagtaaatttttatcgtaattatgatactatgaaaggaattttttgatgagtgatataaattctcagaaacaaaaaaaacagtcggctaaaggcaggaaatccatgcttattattggtattatactcttaaacatatcaatatttatggcggcatttgtgttttcatttaatatgataatcaatccaatagaaaagcgtgatatccaggtgcagacgctgactgacgagaatacaaaacttaaaagtgattctcagcttttgcaggaccagctggatgttgtacagtcagaacttgattcatataagaaaaagtatggaggttcctcaaattcaagcaaaagtaatgcctccggttcttcaagcagcagtaaaaacaactctgaaagcggagaaaaatcttcggacagaagcagttctaactcgtcaaacgaagacgatgatgaagacaacagttcctcaagaagcagaaatgtttctgggagcggatcaagcgagagagacttaaatatggataatgattagtcttaacgacttaaaatatagctgaaatacttgtttgaaaggggaatggaaatgaaaccgaaatacaaaagaataatgataaagttaagcggagaagcgatggctggagacgaaggctttggtcttgatcataataagattgacgctatagctaaagagataaaaaaatgttatgatatgggaacagagataggcatagtcatcggcggcggtaacttttggagaggccgcgacggcgagggtatggatcgttcaagagccgatcatatgggtatgcttgctactgttataaattgtctcgctatgcttgacgcgcttgaacagctgggcgttgaagccagggttcaaacggcgattgagatgagacagatagccgagccttacataagacttagagctggaagacatttggaaaagggaagagttgttatatttggctgcggaacaggtaatccgtttttctcaactgatacggcggcggctcttcgtgccgcagaaataggcgctgaggttatacttttagctaaaaagatagatggtgtttatgacagcgatcctaatataaacccggatgcaaagaaatttgataaattgtcatttatggacgttcttaataagggattaggagttatggacactacagcggcaacgctttgtatggataataatatacctttgctggtatttggacttgatgaacctgaaaatattgttaaggttttgtgcggcgagaatattggaactatagtatcttaaattataatataaaaagaaagggatgttagatatgaaggaatccgagaacaaaatgaagaaagcggttgacgctttagagagaaatttatctcaaattcgtgcagggcgtgcgaatcctgcaatattggatagggtaactgttgaatattatggtgctcccacacctttggcacaagtcggcactgtttcagttccggaagcaagaatgattgttattcagccttgggacgcaagtattttgggtgatattgaaaaagcgattaacgcgtcggatataggaattcatcctaataatgacggaaaggttattcgtttgaactttcctcctcttgatggtgaaagaagaaaagagttggttaaggaagtttcaaagcgcggcgaggaagctaaagttgctgtccgcggtgtgagacgtgattctatagagcgttttaagaaacagaagaaggccggagaaattaccgaagacggtcttcttgaccttgaggatgatattcaaaagctcactgacagatatattaagcttattgatacaatagttaaagaaaaagaagatgagattttagaagtatagacagttcggaaggggtatgactgtgttttttaaaatagggaggagaacagcccattccgggaagcttgatttaagccgtgtgccgaaacatattggtattattatggatggaaacggcagatgggcaaaaagaagaggtttgccaagaagggccggacataaagccggagctgataatcttgagagaatatgtgattattgcaactcaataggagttaaggctttaacagtatatgcgttttcaactgagaattggaatcgtcctaaagatgaagttgacgcgctgatggaactgctttataattatcttttgactgttgaagagaagtttaagaatagaaatatgaagcttcaaataagcggtgatattgctcctctttctcagaaaattaaagacgcgattgttcatgcggaagaagtcacttcaagcggtgatggacttatacttaatattgctttaaattatggcggcagagcggagatagttaatgctgccaggcttgccgctgctgcggtttctgaaagacaaattaccgttgaagatataacagaggagtattttggagggcttatgtatacttcgaatctgcctgaagtggatttgataatacggcccagcggcgaaaaaaggctgtcaaattttcttttatggcaggcggcatatgctgagttttggtacagtgatatatgctggcctgattttacaagtaaggatatggagcaggcgattatagattatcagaaccgtgacagacgttttgggcggatttgataaaaataaattgtaattatgagctttgttttaatttggattatttaagaaatttttgccggaaacgcattatttggagttggatagtttatttacggctttaggaggcgtggaatttgaaaccgagtttaaagatgagggttttaacagcggcggttggagtgccggttattgttttgattttattggctccgacttgggttatgctatgcacggttatattgtgttcgcttattggaatttatgaattctacgacgcagtgaatatgaaaaaagaagtgccgctgctttgtctgtttggttttttagggaccgttatactccctttgtgtgcgtttttgcttccgaaacaaatattaacatgcgcctatggatatcttgttattttatttttggcaatgctcggcagcaatcgtaaaataatgattacagacgtggcaatgctgattataagccttatctatattccttttatgctgtctcatctcctttttataagacgtttagattttggaaatatattggtttggcttgtgtttttaggtgcgtttatgactgattcgtgtgcattttttgccggaaagctctttggaaagcataagctttgcccaaatatcagccccaaaaagacaattgagggagctgtcggcggagttataggctgcggccttggatttttgctgtttgcttttattattaatacttttatttcagcatatataggcggagcagaaatgagttatatgcttatgtttattttgggtgtaatagcgtcttttgtagctcaaatcggcgaccttacagcgtcgcttattaagaggcagtttggaataaaagattttggaaaaatgttcccgggccatggaggaatgcttgacagatgcgacagtataataatggttgctccggttgtttttatttttgcagctcagataagtttgtttatataaaagtgtatgtttaataattttataactttaatttgaaagcggtaaagggatagggggatgtttgctgcctgtcccattatcgtttttcatttttgttggtattataatataaatatggtgatataatgaataaaagggaaaatttggatttaagagtttcaatattaggctcaacgggttctataggaacccaggcacttgaagtaatagatgatttaaaaggtataaaaaatattcacgttattggtatttccgggaataagaatataaggcttttggaggagcaggccagaaaatatcatccaaagctggttgctgttccgaatgaggatgacgcgaaacaattgaaaatatctcttgctgatacatctgtagaagttgtgtcaggttctgaagggctgtcaatggttgctgcagactcggatgtcgatatggttttgtcagctattgttggatttgcggggcttgttccgacaatgcaggctattaaatgcggcaaggacatagctcttgccaataaagagacgcttgtaaccgcaggtaatctttttatggaagcaatagccaaaaataatgtgcgtctgcttccggttgacagtgagcattctgcaatatttcaaagtatgcttgccggaaatcacagagaggtaaaaaaaatattgctcaccgcttcgggcggaccattttttggaaagacgagaactgaattagtgaatgtaacgaaaagtgacgcgctaaaacatcctaactgggatatgggagctaaaatcacaattgacagcgccacgcttatgaataaaggcctagaggttatagaggcaaaatggctgtttggcgtggatattgatgatattgaagtcgttgttcacagagagagcataatacattctatggtagaattttgtgataacagtataatagggcaaatgactctaccttctatgaagcatccaattcagtatgcgtttacgtatcctgaaagacttccgtctgctgatatgcaggttaattttaaggaattgggtaaaatgactttttatgagcctgaccgtaaaactttcaggtgtcttgatttagcagaaaaggcaggaaaaattggaggaaccatgccaactataattaacgcggcaaatgaagcggcagttaatggttttcttaatgggaaggtgaaatttttagagattgcagagattgcagagagcgctatgagcgagtttagttcgattcagaatccttccctaaacgatattattgagactgacagagaggtgcgtgagactatatgtcaacgtttttaacaattttagcggctattattatttttggagtaattattcttattcatgagcttggacattttataacagcccgtattttcggtgtgacagtaaacgagtttgctataggtatgggaccggttatttataagaaacaggggaaaaataccttatattctatacgtgcagtgccgatgggcggattttgcgccatggaagcagaggatgaggaaagcgacagtccgggggcctttactaataaaaagccgtggaagaggataatcgttcttgctgccggagcggctatgaatattattatgggatttattattgtaacaattatagttataagttcagcggcttcaacaggcggaataacctcaacgactattgacactgttgaatcccaaagcgacgccgcaaggtttttgcagccaggggataaaatagttggcattaacggaacaacagttcatataaagagagatatttcttttgaattgggtcagtacagcggtgagggagaatgcgaattaaaatataaacgtgacggaaaagtttatactgaaaaatttactcctatgcagaccaccttagaggatggaactccatattattatgtgggatttaccgttaagcagaattccataaatcctctgtctgttcttcatgaaggcttttatcaaacaatttggatggtaaaacttgtatttgtatcgcttggtatgctgctgaccggaggtgccagcgtaaccgatttatccggacctgtcggcgtggtgtctgctatgagcactgttgcaaaaacgggattggctgactttattttctttgccggtttccttgcagtaaatatcggtgttatgaatctccttccgctgccggcgcttgacggcggaagaattctgtttgtgcttattgaaatgatattcaggaagccgatacccagggataaggaaggatatgttcattttattggatttttgcttttaataggactaatgttatttgcaacttggaacgatattgtgagactgctgtccggatttttcgggtagcagcagataataatttaaatctcttacagcaacaagctgtgagagattttttaattaggagactaatagactatatgctttttatatttttaaaaaattatttatgacattaattctgccgccaattttgatgtatgataataatgcagaacagcagaacgtcacgcaaaataataaatttatattcttattgattattataagaaatcaaataccttataggtttctgctgtaacgtaaaaacaatatatttttaaaaaaacggataacctaaggagttatcggaccagatttggtgccaaacttgccgtacaagagcatgtgaatgcagtaaataatctgctaccataaaaataaacattaactgctactttacgttaattttttatgctgttataatacaaatataagagaaatgaaaaattaaaaggagtggcaattatgaaaactaatttgaaaagaagattgtgtttaattatttctctggtatttttactgagtgcagtaagtttttcagctgcagcgaatcaaaccactgtgtctttaattcacagtgagggctggcttgaaacagcatatgtgacttggaatgaatattcgggtgctgatggttacaatgtttactgcaaacaagccggaggggaatattttaagctggatgatgaattggttagaacatatccgggatatttcagggcggacgctttgggactgcctgagggtgaatatattctaaaagtggttccggtaaaaaacggcgctgagataactgatgcatcagccgaaacaggagcgctgtccgtgatgaaacatgcacgcgagggttttgctttttctaaaaattctccatacggaacatcaagcggcgcgtataatgatgacggcacacttagagaagacgcagatgttatctatgttacaaacgggaataaagataccgttacaataaacggcgatgaatcgttgggagttggtctttataatattttggcttatagggagtcaaagaagataaagacaactttgtgcataagacttatcggccgtgttgatgaaccggcgttaaccgacaatcatacagtgaggtttattaacacgggtaatataactttggaaggcgttggcgacgacgcgctaatatatggctggattatcacactaaaaagaagcagcaattttgagatgagaaatttcggaatgatgtacggcggtgaaggaaccacaggttcggctgttgttcttgatactgataataaaaacttttgggcgcacaactgtgactttttctacggtgcgccgggcaaggacgctgaccaaattaaaggcgacggagctatagatattaagtccaggtcagattatgtgactgttgcgtataaccatatgtgggatttgggcaagacttgtgtctcgggcggtccgtgggaaaacagcaatatgtatactgatgaagccaagatttatgctacatatcatcataactggtttgaccatacagactcaaggcatccgagatgcgtagttggcagcaaccatgtatataacaattattatgatggcaatgcactttatggaatcggtgcggcaatgaaaacatcggtattttcagaaaataattattatagaaattgtcaaagacctatgataatagcgtctcagggcagcgactgttacaactctgaaacaggaacatataatgataagggaactctttcaggacaaatgggcggtatgataaaatcctacggggacgtaattgttggagcaaaaaggttttatacatatcagaatactcctgacgagggagaatttgacgcatatatagcaaacagccgtgatgaggttgtgccggaaacggtaacagccaaaaaaggcgatgaagtaggaaaagggacatataataattttgataccgaccccagcattatgtatgagtacagtgtagataccgcggaagaagctgttgaaaaggtaaaaaaatatgcgggcagagtaaacggcggagactttaagtggacctttgataatgcggctgaggatacgaaccacgaaataattcctgaacttttggaggctataaagtcatataagtcaaaactcgttgctgttgcaggaggcgctgttccagtagaaccgccttatgtaacgcctacatctgagcccaccaaagacccggatgcaacctcggcgccaacggcaaaacctccgggagatataacaaaaataccaacgggcgtaaccagttatgcaaaggattggttcggcggagaaagtatgtctgccggagatatatcaaatgatggttatgtcggctgctataagggaaccggaaacagttataagacaaataagtttacggcaggagatgtatcaataacaagaggatatcaaactaaacaggtagattcacgttcattttattgtattcctgaaagtgaatgtttggtaacggtgtatttttattcaaacggctccaattatttagggttgtatactaccgatttaagcacaccggcagctacttttacacctgaggcaggaggggactgttcgttcgcctatcattttacagaagtgggatcgccattgtatatagccggacctgtcggagatataaatttggctggtatttctgtcacagaagcgggcagtaatccgacggaaagcccagcacctacatcggttccgtttgaatatcaaataaacagcgccgaatatattaacgggaatcttgaagttgagataaaatataataaaacagacaattcggaaaatgcaagtctaatcgctgctgaatacaataaatccggaatactaattggtattaagacggctgacgttttaggcagtggaaaatatgttataaatggattgcaggagacagcagaaaataaagttgtactttatatttggaatagtgctgataaaattacaccgctttcagacagttacgaagttaaataatagaaaataaattaaaagtaataaatttcttcccaattaaaaaactgcataggagatttatgacaaaaaataaaaattattagctgttctatgatccggtattataataccggatcagatttttttaaaatattagatgtaacatggtttgtaaatttcattttaatagtgaagataaaattaactaactttatttattaagtcttatgactttttttgttttatttaatgatttaaaatattaaaaaatatataaaaacaaaataataaacagctatgttattttgggttgtaaaaaaagtatttactataactttagtgttatggaaaataaatctgaaaaacttaaatttttcggataatataaattatataaatttttacttgacaaaatttttaagctatggtatattatatcggtaaccgcgcagaaggggttttattaagttgcggaagccaccccaatggcgagtcttgggtaataggaggtattacgattatgtacgcagttatagaaacaggcggaaagcagtataaggttgaacagggcgatacagtttttattgaaaagcttgatgttgaagccggagaaactgttacgtttgataaggtcttgattgtcggcggtgacgacgttaaagtcggcgctccttacgttagcggagcaagcgttacagctactgttgctaagaacggcaagtcaaagaaaattattgtttataagtacaagcctaaaaagcattatcacaagaagcagggacataggcaaccgtatacaaaggttgagatttcagcaatcaatgcgtaagtattgattttcataatttttgatagcaaggagtgattaagaatggctcataagaagggaatgggtagtaccaaaaacggaagagattccgagtccaaacgcctaggcgttaaaaagggcgatggtcagcctgttattgccggaaatatcctcgttagacagagaggaactaagatttaccccggagtgaacgttaaaaagggtagtgatgatactttgttcgcactcgttgacggaagagttaagtttgaacgtaagggcaagacaaagaaacaggtttctgtttacgaaattgttcagtaatttaaacagctatagtggggtggactttgtccgcccctttgtttttatatattaagtttaaaataattgtataggattattgttttaaacttaatatatagttagagctatatccagcgctcttagagcggaacaggaggaaaaatatgttttcagacagtgcgaaaatatttattaaagcgggtgacggcggaaacggagcggttacctttcatagggagaaatacgtggcggccggcggaccggacggcggcgacggaggaaaaggcggaaatgtcatttttgttgctgataagaacgttaatacgctggttgatttcagatacaaaagaaaatttgccgctgagaacggcggaaacggcagagacgcgaacaggaatggcaaaaacggcgagcatcttaggattaacgtccctgttggaactatagtcagagatgaaaaaacgggacttgttatatgtgatttgaaacaggacggcgaggagtttgttattgcaaaaggtggtataggaggctggggaaacgcccattttgcgaccgctaccagacaagtgccgagattttcaaaaccaggcgcgcctggcgatgagagaatggtaactttggaattaaaattaatcgctgatgttgggctgctgggatttcctaatgtgggaaaatctacattcctatccattgtcagtgacgcgagacctaaaatagctaattaccattttactactctgcagcctaatttgggtgtagtgaatatgggtgacggttcatttgttgtagctgatatacccggaattattgagggcgcacatgaaggagttgggcttggtcatgagtttttaaggcatgttgagagaacaaagctgcttctgcacgttgttgatgtttcaggaattgaaggcagaaacccgattgaagattttgatacaataaataatgaacttaaactgtatagtgaaaagttggctcaaaaacgtcagatagttttagctaataaatccgatataccggggtttgaagaaaattatgaggcgtttaagaaagagatggaggacagagggtatacggtctttaagatatcggcggctactaaagcagggataagcgaagttctgaaatacacctatgaaattctttctaaaattcctgatgaggagtttgaagaagaatacgaaatgtttgatttggagtcagacagaaaagctgacgatacgattacagtcagtgtggaagacggagtttatcatgttgagggcagacgggcacagtttattgtaggttctaccaatatggaagattatgaatccctgcagtatttccagcgtgcacttataaaaagcggtgtaatagacaagctaaaagaagccggaatccaggacggagaccctgttgaaatatatggatgtgaatttgactatgttgaataattttttaaattggcttagtatctcggggtttaataatttgcatatactggagtctgtaaaaatatatttgatgatgctgccttttattgtattggcgcagtgtttaatagctaaaaattcacataaattaggtaatgattataatctgcaccgtgtcattacggtgcagattttctgctttctatgcgtcggcattttaacaacaacaggtgttcctgatataaaatatattattgctcataaatattcactggacttagatattattaattatagcaaagcggcaatggaaaggttgtctcctattaccagcaaacttatttatctttttaatccggctgaaatacatattaatccgtatcgtatgtattttaatgaccaaatgagttatattctgaacgtcattttatttgttccctttggattcttattctctgttctgagtattgataaatcaaaaatcggatggaaaaggattgcagtaataggttttttgttttcattttcaattgaatttattcaattatttaataggagaaccacagatttagatgatttaatcaccaatacattcggagcggttttgggatttataatttatatgatattatataaaagaaaaagattgaattttattacgaatatgcggtgcagcggaagttttataactctttatgaatgtgaaatatatattgtattaatatatgttttatggttgttgaacccagtgtaaattcgtgtgaaattataaataaaaaagaaattatatggaaaatattgacatgaaatgtatttcatgttataatagcactaattcaatttgaatggtgctatttttttgttgtatttatataaatgtgaatttaaagaacaaattttggaggataatttatgaaaaaaagaatttgtttggcagtgtctgcagcgctgatttcatcttgttgtattggatatagtgttttttctttagaaaaaccaaatatattcgttaatggaaatcaaatagaaaccgacgcttttattcaggacggcgttacctatgttcctttgagggcggttagtgaaagtttgggcgcagatgttgcctggaatgaagaaacacaggaaattaatattagtcagtctcagtcaggcgcggatatttattcatatgctattaataaaatttcgcccagtactgttgctatagtggggaactataccggaaacactaccgcaacttatcaggataaatatgcggagggtatagctcatggtaccggagttgtaattacgtcggggggagaaatactgacaaacgctcatgttgttgaggatatgtcgtcaataattgtgattttgtcaaacggcgaaggttatgaagggaaagttaagtatatcgacagtgaccttgatttagctgttgttaagattgaaaaattgggtcttacggtagctcagtttgctgatgaaagttcgatttatccaggaaatcaagtagttgctgtcggaactccggtatcaatgtcactgcggaactcggtttcagccgggattatcagcggtgtaaaccgaagcacttcgagcgattataagcttattcagaccgacgctgcaattaatcccggcaacagcggaggtccgctggttaatttaaacggagaggttttgggtatatgttcttccgggtatgttggaacaggaattgaagggctcagctttgcgatacctatatcggacgtaaaatatgcaataaatcaatttcaaacatacggcaaagtaaaaagaccaagctttggaggggagttccaggagagcgcagctgcgaaatatggactgccaagtaatgaaggcctcacgttctcgggaatagttccgggcggagccgcagcaaatgccggaatacagaatggcgatatattaatctctgtcgacggcgtttatgtaaattctaaaatagactggaacgaactatcaaaaaactatttgcccggaagcggtgccggcgtgcaggtaaagcgaggggatagttttatagatacatatataacttttgatgaaaaataaaaatataagaattaaaagcggaggaaaataagatgaaaaatatttttaaaaaattattggctatggggattgcgctgatgatggtgtcagcatgtgtttatctgccggcatttgcggcttccggagacaatgaagaaaacaatgaaaatatagttgtaggcgatattttagacgagataggcaatgaaaattcagataacaatgaagtaactgaaaagaaaattacaattgcgtttaaaattggagacagtattttaaaaatcaatgatcaggatgttgctgtaacaacaccatatgagcagaatggcacaacgcttgtgccgcttagggttataaccgaggcgtttggagccactgtagaatggaacgacgctgatatgggcgttacacttacatatgaggatgttgtaataaatatatggatagacaggacggatgctttggttaatggtcaaaagactacattgcttttggctcctcagctgacaaacgatactacaatggtacctcttagatttattactgaaaattttggcgccgatgtttcatacgatgacgctacagaagctattttagtggagaaaactatagttgaggaaggagctgtaacagattattcttctatactgcataatacggacaaagagtatataggagacagctattacggatggtctatgaaagcgtcaaaaagtttaagcgtagcagaccgtgcgtttgatggaagaaatactgtttttgcttatggagataaagcggctataggaatatttataacaagattaaacggtataacaaaagatgaagtgtttacattatttaaagagactgcaggtaacaaaactattacaaaacagtcggaaagcaaagattctcaaggtaatgattgtcttataatagaaacaaaatcatctactataaaagaatatcagaagcatattatatctgacggactgctttatacagttttagttgaagtcagtctggacggtggagacatggattctatttctcttgctgagacattttccataaacgtaaaggattttaaaaacgctgtggatttgtcagacgttgtaaatggcaagagaacttatgagaataaaaacttaaagttcaaattagatatgcccgccgactggtatgagtcatcaaataaagatatagaaaatgttataacttttacaaacagagaaagttacagtgataactcatacagctatgttggagtatctattcaatccgtagataatatttcttctattgatagctgggctagacatgactatgagggaaataaagaattatataatttggattacgcagaattcagtgacagcgtgaaaactaaatcatttttaggaaacgatgcaaagtattacacatacagtgttaagaatagtgatggcaaagtggttgaaactatggaagacattttctttgttcagggtgattatgcttataattttgcattcaaggttgttggaaacggcgacgctgatatagaggcgataaagaagtctgttactgttaaagatattgacaagtctaaagttggaagtttgttggttaaacaagaggatgatattacatatacaacagtaaatgggtcagctaacgtagaatactccgcaccgatgacatggaatataaaccgtgatgctgggagcaactcttcaatggtaaataatggcgtagatacgtctgttattgtttttgcaattgatggaaactatcgtattgaggatgctttgaattcaatgcttaaagattattcaaaaaagagtaaaaactataagttaataaagccggcctcttatactgctgtaggaagcaagaaaggataccgtgcggttttctcttatgaagataatcaaggtttggcttatataatggatatttttatttgcaatgacggtaataattgcgttcaatgtatgcttgatactccgatagagtattatggagcaaagaatataaagatttttgaaacagttattgattcggttaatgtaaaataatttcaagtttgaaaagggtttgcaagtaaacacctctttcaaaaatacttcacaaaaaacggtactctttttatggctaaaagtctgaagagagcgccgttttttcacgataatagaatattttgtgatttgctgtcataattttgtgttttgcatccccttttgtttaatactattataattagttatattttacaaattttaaaaatactcttgacaagcggggtaaaataagttaaaatatcagagttgtaaagttaatttgctttacaagaggttttatagactgagagcggactgaggtattatggagaaaaatgttaaagtcgcattattgtttgacttttatagaaatatgctcacttcaagacaggctgagagcatagatttatattataacgaggatttatcgctggctgaaataagcgaacatatggggataacccgccagggcgtcagagataatattaaacgggcggagaacaccttgtttgatactgaggatagacttgggcttgcatccagatttcttaaaataaaatctgatttgttgaaaattgatgatataatccgtgatattgaagcttctcctaatgtgaaatctctgtcagatgatataaaacataagattaatgatatattgattataatacatgatataaataatattgagacggaatagttttttgtgaattcggtggttttagagaatttattgaggtgtatatatggcatttgaaagtttatctgaaaaacttcagaacacatttaagaagctcaggggaaaaggaaaagtatctgagaaagatttaaaggcagcaatgcgtgaagttaagctggcgcttcttgaggctgacgtaaactttaaggttgtaaaagactttgtcagggatgtttctgagcgtgccggcggagcggaagtaatggaatcattaactccggctcagcaggtaataaaaatagtaaatgaagaattaataaaattaatgggcggtgaagctgagaagctgaatattgcttcaaaacctcccacaattatcatgatggcaggtctgcagggagccggaaagactactactgcggcgaaactcggcggactgctgaagaagcagggaaagcggcctttgctgtgtgcgtgtgacgtttatcgcccggcggcagtaaagcagctccaggttgtgggcggtcagctggaacttccggtttatgctgaagagggcgttaccgacgctgttggcatagctaagcgcggtcttgaacatgcggttcagcattctaacgacgtattcattattgatactgccggacgtcttcatatagatgaacagcttatggatgaattgaaagagattgtcagagaagtaagccctactgaaattcttttggtagttgacgctatgaccggacaggacgcggtaaacgttgctgataagtttaacagtgagcttgaaatttcaggcgttgttttgactaagcttgacggtgataccaggggcggtgcagcattatctgtaagagctgtaacgcagaagcctatcaagttttgcggtatgggagagaaactcacagaccttgaacagttttatccggatagaatggcttcaagaattttgggcatgggagatatgctcagccttattgaaaaggctgaacaggctttagatttaaagaaagccgaagaactagaaaagaagctgatgacccaaaagtttactttctcggattttcttgaccaaatggaacaaatgaaaagtatgggtcctattcaaaacgttttgggtatgattcccggagtgaatgcaaaagctcttaaaaacgcaagtgttgatgagaaaaaaatggctcatatagaggcaattataacatctatgacgactgaggagagagagcttaaagataagcttactccgtcgagaaaagagagaattgcaaaaggaagcggtacttctatagttgaggtaaacgcattgcttaaacaatttgagcagatgcagaaaatggttaaacagctttccggcggcaatatgaataaaaagtttaaaagaaaagggctcggcggaatgatgggcggcccgggaatgggcagcaaaggcggatttccgttttaagcttcagagctttacagcagtataaatcaatagaaaaataataaaatttatatacattaagaattaatttggaggatttaaaaaatggcagtaaagattcgtttaaagagaatgggagcaaagaaggcacctttttaccgtgtagttgtagcagactcaagatttcctagagacggaaggtttattgagcaggtaggaacatataatcctatggtagaaccggccgctgttgagtttgacgcagaaaaggtacagaagtggattggaaacggcgctcagccaactgatacagttaagagacttttaaagaacaagggtattatcgactaattttaaatagtttcccttgcgggaggatgaaaaaatgaaagaactgttggaatttatagctaagtcaatggttactgaccctgagtctgttcaggttgaggttgtcgagaaagaaaaccttacagttctgaagctccatgtcgctgaaagcgatatgggtaaagttataggaaagcagggaagaattgctaaggctataagaactgttataaagagtgcgggcagccgcgagaataaaaaagttgttgtggacattttatagtctaaaggttatctcgttttgagatagccttttaacgtattggatattttgcgtctgacaagaggtggcaaatatgaacacattcgaaagaatatatgagatagtaaaacaaattcccggcggcaaggttgcaacttacggtcagatagcgtctttggcaggaaatccccgtcttgcaagagttgtgggttatgctctgcatgtcaatcctgaacctgatgaaataccgtgtttcagagtggtgaacagaaacggatgcacgtctaaggcatttgcctttggaggcgaggatcatcagagaatgatgctggaacttgacggagtaatatttacagatgatggaagagtggatttagataaatgtctgtgggatggaaatgtgaatacagttaaaattgaaaaatcaagcgatattacagaggagtaaaatgatgaaagatgatttgctggagataggaaaaattgttaatacgcatggtattaggggagaggtaaaaatacagccttggtgtgatgaacccgagttatttgacgagctggagtatttatttatagaaggggaaaaatataatattgtgcgtaaccgttttcataaaacatgccaaatcgttcagctggaaaatgtgaacagcattgatgatgctgaaagatttaaaaatcaaatagtatatataaacagagatgctttggaactgcctgaggggagatactatattgccgatattgaagggctcactgtaaaggaacagaacggcagaattttgggcgttgtcgacgaaataattaagacaggaagtaatgatgtgtattccttaaaagatacattcaacaaaaagccggtgcttattccggttattgaaggagtggttcttgagacaaatatagacggaggatatatagtagtcaagctgcctaaaggtttgattgatgactaggaatttatttcttgtataagttttgaaaaggaagcggggatttttcagttatgaagtttgatatattaacgctttttccggaaatgtttgaagccgtattggataaaagtataataggccgggctaaggaaaaaggtttgcttgaattaaattatatacagataagggattttgcatttaataaacacaggagcgtggacgattatccttatggcggcggacagggcatggtaatgcaggctgagcctatttttaaggcgtatgaaagcgtgactgaagatttaaattataaaccttatactgtttatatgtctccgcagggaagaactttcagacaatccacagcaaaacgtatggcaaaaaagtatgaccatgttgttatactttgcggacattatgaaggggtggaccagagacttattgatgagataatagatgaagaaatttctattggggattttgttctgaccgggggagaaattgcggcgatggccgtggtagacgccgttgcgcgtctgatacccggagttttaaaatctgaggaggctttttcggacgaatctcactatagcggattgctggagtatccgcagtatacaagacctgaagtttggcataatgagaaggttcctgatatattactaagcgggcatcacaaaaatattgagaattggaaaagaaagatgtctatagaaaatacttttaaaaagcgcaagagcatgcttaacaaagctcgtttgacagaagaagaacaagaattcgtaaaaaaattaaaattagaaaataaatagcaattttaataatttaaacgccttatttgaggaatacttaaatgaggtgtttttttctgtactgttaaaactgaaagccattttttgtaataatgataaaatttttataaaacagttgttttttgtcttataatgtggtaaaattatatttaattataattgtaataagtatgtttgaaaacagtatataaatgacccagaaaggtggttgagttatcaatgaagtgtgaaaagtgtggcgctgacattccggcgggagcgaaaacctgtcccaagtgcaatgccgctgccccccaaaacaccgttccgcagaataaaagtgttaacacaactgataaaaataagagtgcgtctgccggaaagaaaaatacaaattccaattccaatcagaagttaacttcgtcaggcaagattaatacttcaggacaagctccttccggtacagaggataatgagtttgacagacagtattctctgatgtttgaaagtaatcagtcaaatgttggagacgctgattatgaaattgatgaatctttgaaaaagaaaagggaagcaagatatgacgacagttttgctaatatgacagacgacgagaaaatcaaggcgttagaagcggcaagattggcaagaaaagaaagacgcgaaaaaaagcaggcaaaaagaagcggcggtattttttcctcattctccggtcaggataaagaaaataagactgttaaagaaacagttgaaaccggtgagcgttctgattcttctgctccattcggtcaaagaagccataaagctaccggcgccgcagagagaaagattgaaagagtacagagttcttctgatatttcaactgtaagcggatctgccgataagtctgctgcagtagaaaagcgcccgaaaaggagcagcaagcgttcaaaaaactttaaggtatcgcctaaaacaggtttgatagccggcgttattgttgcggttcttgttatagcggttgttatagcttcagtaaatatggcgtctaaagttactgcgggtgttccggcaacgccaacggtgtatgctaaggataactctctttattcctattatggaggcaaatcagtagaggtcagtcagaatttcatcgccagcgaatatacggaaccaactgaaccaacagcaactccaaatagaaacagagatgatgacgaggaagaaactcccacgccggcaccaaagtttgaacccataaaagaaaaagagcttataaattatactgctgacggaactttgtcttttttccttgataatgctgatttaaacaataatacaggttcattgcagtatactcagaacggcaaaaaaaattctacagttaagattgcggataacgtatattatgatattgagattgctgaagacggaagcggagttttatatttgacggatactgatgaatttggtgccggaggaactcttaatttctggtctaatatctctaaaaaggctgtaaagctttctgataatgtgaatattggaaatttccgattcggacagaacggaaacagtgccttatatataacagaatataacggcgagtattttgtaggcgatttataccttgcagaaataacaaaaggtgaggttgctgaggctaaaaaaatagagtctgatgtatacaaggtatttggaacaaatccaaccggaaagtccgtggtatatgctaaaaactataacactgaaaatgagtgctttgaaatatatcttaaaaatgataacttaggtgaacctgttatggtcacagacggttccagaatagaacctatcttcctgaaaaattcagagggtatgtatataggcggaacgtatgaagagtattatcagagcttatattatgcgagtcttgaaaatggcgagaaagaaaaaattgccggcgggcttacagagataataaagatgagcaaggatgaacaggctgtagttttcagaaaggcaaacgctgagggaacggcttttgattatttttatgcaaaccaagccgggacagaaggtcagctgatagctgaaaatgtgactgtgcttgatgatgaggaccataagaaggtatcacagtttgaaataaatgacgactttactaaggccgcgtttattcagggatatgatcttgctaatgagagcggagcattgttttttgtttcaataacgaacggagtggttggttcagataaaaaaatcagcgacactgcttattcatgcaatataacacctgacggacagacaatcagatatgctgataattatgatataaaatggaatttggtaacactgaacgcatatacaggcgaacaatcgaaggttttggcgcaggaggttggcgcaggagcattttcttttgataaaacaggttcatatattgtatatgctaaaaattacagtttagaaaccagaacaggagacgtttattgtgttgacaataaaggaaaaactgttgaggttgttaaaggcgtaagttcatatggcctcaaaaataatggtgagatagtgtattataataaacaagacaacggttcaaactttgagttgttctttaccagagaagacggtaagaagtcaaagtctattgacaaggatgttaccaaggtggtattatattaaattattatgaaaaaaatcggaataatgggcggaacattcaatccgccccatttgggtcattttgttattgcagaacaggcggccgaacagctggatttatgcagagtattgtttatacctaccggcagaatagtttataaaaatactgataaatcggccggaggctgggacagatataatatgctggataaggttgtttcaaaaaatccgatgtttgatttgtctgatatagagataacgcaggacgagacgacatatacggctaatactctcgcaaaacttcggaaaatttatccgaataatgagtatgagatatattttattataggtgctgattctcttgattatatcgaaaagtggtataagcctgagaagatttttgaacagtgtacggtagctgttgccggccggacaggatttactgacgaaaacatgaatgaaaagattaatattttgagaaacatgtattcagctgatattataagaatagatgtgccgtttatagatgtatcttcaagtatgctccgggaaagagtgaaagaagggaaatctatcagatattttacggatgacagtattatagaatatattttaaataaagggctttatcaagcgtgtaagaattaattctacggaggtgtgccggtttgttagaaatcgacgggataaaaagtgaattaaaaaaaatcctcagtgagagacgttatatccattctttgggtgtggcggaagaagctgaaaaattggctcggagatatggcgctgaccaatcaaaggcgtatttggcaggactggttcatgattgtgccaaagagtttccgccggaagagatggagggaattcttaaaactgaatacggtgtgccggttgattctatgtcgcgtcttatgcccaaaattctgcatggaccattgggagcatgcgaggcgcagagaaagtttgaaatttatgatccggaaattttagacgctattaagtatcatacaactggcaagggaaatatgagcacccttgccaagataatttatatagctgattacatagagccaaacagagactttgaaggtgtcgaaaaactgcggcgcttagcttatgaaaatatagacgaggccataatagccggtatagatgaaactattttagatttaatcaaaagaggtcttataattcatcctgacactgttcatgcaagaaacgatttaataatcaagcgcagccagagataagagtgcgtgtatagacaaaggagaagtcggtattatgagaagaaaatcaccgtttcgccgcatgatggctgttgtgttggtgattgtatttgcgtttgtgggttttaatttcggtaaaatgttctttggcgataacgctgagtcaagacttacagaggttacaaacattattgtggcgggcgtcgatgtggacggttacagaacggacctcattttatttgttcaagtgaataatattgataaaaaagtgagtgttctgcaaataccgcgtgatactaaagttaataataagagaaatgataaaaagataaattccgcttacttttcggggatagagactttgaaaaaagaagttgaaagcgttaccggactgcatgcggacttctttgcaaccattacttttgacgcctttaaagagattgttgacgctttgggcggcgttactgtagaagttcctatagacatgaattatcttgacccaattcaggggcttagcatcgagcttaaagcaggaaaacaaaagctagacggcgagcatgctatgatgtttatgagattcagaaagaatgacgacggaacaggatatcctatgggagatcttgatagaaataaagcgcagaaagagttttattctgcggtcatgaaaaaagctttgagcccgattggaatattaaaagcaccgtttttatacagtgctgttatgaaaaacaccactacagacttaaacaatgccgaggttagggaacttatgtttgatatgtttactattggaaagaataatgttaatatatatcagcttcccggagattctaaatatataagtaacatctcatattttgttgtgagcgaaagagaagctaaagcaatgataagtgaaaattttagataataaatttaagtttgtattaagaaaggataaaaaatatggcaagtactaatgagacagtgaataaaattgtaaaaatacttgacggtaaaaaaggaagagatattgaagtattaaatatatctgaacttacaacaatgacagattattttataattgttaccggaggttctgatacccaggtaaaggctttgtgcgacaatgttgaagaggagcttgaaaaggaaggtcttacacctgttaataaagaaggatataagacggcacagtggattcttttggcgtatgatgaagttgtagttcatatttttcttggggagacaagagaattttacggattggaacgtgtttggaaagatggaataagggtcgacgtttcagacctgctggtgtaaaaacagaaatatttaaacgttaataacagtaatcaggaaggaatgaataggattgaggtacgattttaagaatattgaagagaaatggcagaaaaagtgggaagacaacggagcatttaaaataaatgaggatgataacggaaagccaaaatattatgcgcttgagatgtttccttatccgtcaggcaaccttcatatgggccatgttagaaattattcaataggagatgttgtggcaaggtataagaagatgcaggggtataatgttctgcatccgatgggatgggattcttttggtctgcctgctgaaaatgccgcaattaaaaacggacttgatcccgctgagtggacttggtcgaatatcgataatatgcgcggacagctgaaacggctgggattcagttatgattgggaccgcgaggttgctacggctaagcctgattattacaaatttactcaatggatgtttgaacagttatataagcataatttggcttacaaaaagaaatcatatgtaaactggtgtccttcatgcaaaacagtgctggctaatgagcaggttgttaacggcaagtgtgaacgctgtaaaagtgaagttgggaaaaaggatttggaacagtggttctttaaaataacagattatgctcagaggcttttggatgatattgataagctcggcggatggcctgataaggttaaatccatgcagactaactggatcggcagaagcgaaggagcggagataagatttaagatagacggaatggataaggaactcactgtatacaccacgagacccgatacaatttttggcgttagttatatggttattgctcctgaacatccggttgttggtgaactgataaaaggaagcgaaaccgaagcggaatgcagggagtttataaaaaaggttcagaatcaaagtgaaattgtccgctcggcgacagatacagaaaaagaaggcgtgttcaccggaacatatttgattcatccattcacaggtgaaaaaatacctctgtatttggctaactatgtgtttttggattatggaacaggtatagtaatgggagttccggcgcatgaccagcgtgattttgattttgctaagaaatataacttacctataaaaattgttattcagccaaaaggccaaaatatgaagtcggaagatatgaccgaagcgtttgcggctgagggtataatggaaaattcagatcagtttaatggaatggacagcaaagaggcgcttgcttctataattaaatatatagatgaaaagggtataggagagaaaaaagtaaactttaggctcagagattggctgatctcaagacagagatattggggagctccaattcctgtggtttattgtgaaaagtgcggcgaagtgttagtgcctgaagaacagctgccggtgattttgcctgagaacgtggagtttaccggtcagggaaagtcaccgctaagcgagtgtgatgagtttgtaaatacaacctgtcctaaatgcggaggccctgcaaaacgtgagacggatacaatggatacgtttgtatgctcttcctggtattatttgagatattgtgaccctcataatgataagatgccttttgataaagaaaagactgattattggatgaatgttgaccaatatataggaggagttgaacatgcgattcttcacttgctgtattcaagattttttacaaaggcgctgcatgattttggatatttgaactgtgaagaaccgtttgaaaatttactgacgcagggaatggtattaaaggacggaactaagatgtcaaaatcacttggcaatgtagtaagtcctgaagaaataatagagaagtacggagctgatacagcgagactgtttatattattcgcggctcctcccgagagggatttagactggaatgacactgctgttgaaggggcttatagattccttaacagagtttggagagctgttgaagatttaaaatgttatgttatcagtgatacctccgatatgtctgatttaaatgatgacgataaaaagttaaggcttgcggttcacactacaattaagaaagttactgctgattgtgagagattcagttttaatacagcaataagttctgttatggaaatggtgaacgcgctttatgtctataaggaaaaggtgaacaaggaagactataacaagtcggttataactgaagctttggaatcgttagttatattgctttgtccttttgttcctcatattacatcggagctttgggagcttatgggcaaagaaacagatataacaagcgaaaactggccgaaatatgatgataacgctttagttgtagatgagattgagattgttcttcaaattaacggaaagataagagataaactgaaaatcaatcctgatatgagccctgatgaaatgaaagagctagctttggaaagcgaaaaaatacaggagcttatagacggaaaagaaatagtgaagtgtatcgctgttcctaaaaagctgataaatattgttgttaaaggataaaaactggagttttgcaaaagcggcgggaagagcagactataaacatatttgggtgaatggttgttatgaacagagttagattaagaataaacagaagacgaagaaacaccattattataatagttattatagctgttttagctgcatttttggttccttattggactgaacccgggattccggtatttatgtaccattgtgtggcggatgaacccaggggcggagatgaaaatttatattgccgtccggctcagatagaagaacagtttaaataccttagcgacaatggttatacgactttgtttgctgacgagtatgaacaggcttacagcacttataagcctgttatacttacatttgacgatgggtatgaggataattatattgaattgtttccgcttttgaaaaagtaccatatgaaagcaacaatatttgttgtttcctcatatgtcggaactaaaggatacctttcggaaggacagctgaaagaaatggttggcagcggtcttgtaagcatacagagccatacggctcatcatgtggatttatccaatgaagataaaagtcatatggatcaggaattcagagagtcgtgcgcggctttagctaagataaccggtaaaaatgtcacaactatttcgtatccgggaggttactttaacgataaggtcctgaatgaagttcaaaggtattttacatacgcatatgcgatagacacaaatgaatattcaaaagataatcattatgaaatatcaagaggcggcgtgtatagaaatactactttggaatcgttttctatggcacttcgcacctattcacaaagacgccttatcagagagatgtttaaattaaagcataagatttttggataactataatgcagagactatagcggtctctgcattatttatattaaaatattccgcttgcagatacattggaattgtttatgtaaatgaaaaagtatgttaattatatacttttggtcttatcaaggcttaggaaataagtctgcgagtgattaaaaaacaaaagcactcaccgatttaggtgagcgcctttgcacttatcttaaataatatatcattttgatctgtttgtcaacaataaacgggttaaatattgacgcagtcaaaaatacagatcaaattttctccgaatactggtgtttcaaggtgttgtgttttcttgaacattaattgttatttaaagcttaagcggaagttttgcggttacagtttctgactgctgctgcatggtgatttacagattgcttataaatcagactacgcccaaagactgttgtaaaccgtctgcagaaatttgcataacttgtaaaacacagaactgtttattaattcaataaattagtgattgctgaggcagactttttgttattaaagcttatctatgatattgccatacataaatttgttttaacgttataaatatatggctgcacataaacagctttgcaaaggtatcagcagcgtataatgattcaattaaatattacttgaccaaaaaatcttttctttaatttctgggatttttaaagataaaaatttatttttgaggttattgggataaatttgctgctttcaaaaaatattggtctaatacaaattgaatatacctaaatctgacatcggcggtataatcggatttaggcgacgctgtttcaacacaaagacttaacaataaccaacatacaaacacttgatgttgaataggtcaatacatctccgctgtagctcaaaataatctggttctccttttattatgagcagcagaaaacttttcgtcacaagacgactattttcgccgctcaatgtattctatgaggaaaagccgtaaatgtgtattatttatttaataaattataagataaaaataattatataaatttataatatttaacaaaagtcctccgtttaattagaaacggaggactttgctgacgaaaaacgtcttaaaaagggggaattatatatttttattatattcttttgtaattataaaatcaactattaacttagtattttatatataaagatgatattactgtataatagataaaataatcagttgtttagaaaggatgttataaataacatatattttgcaaagcaaaatgtagaaaataaataagtaaaaactattgacctaaaacataaattatgttaaaatatttaagtcatgttaaatcggggctttagcggtgccttgtaaccctcaatccgctgtagaggggatgaaaacttgccatgagggatatctttgtttggtctgcctcgcataagtggtgttgacggtttggtcttacgcaattggaacctgtgaacctcgtcagggcgggaacgcagcagcgataagcagtcattctgatgtgccgtaagggtgccaaacttgagctaactgtgggagtaacgcttgtaaagctatttcgaatgcaagcacatggcttttttatttatctgtgctttttaaaagaggtgaaggacaggtgtccgaaaaataccaggctttatatagaaaatggagacctatgacgtttgacgacgtcgtaggacagaatcatattacggaaacgctgaaacatgagcttgcttctgaaaaaattgggcatgcctacttgttttgcggcactagaggcacgggaaaaacaacaacagcgaaaatattctccagagctgtaaactgtgaaaatcctaaagacggagaaccctgtaatgtatgtgatacatgcaagggtattatcgacggcagaattatggacgtttatgagatggacgctgccagcaataacggtgttgacgctatacgtaacctgcgtgaagaggtgatttatacaccggccggatgtaagtataaggtatatataatagatgaggtccatatgcttacgatacaggcgtttaatgctcttcttaaaactcttgaggagcctcctgaacacgcactgtttattttagcaacgactgaacctcagaaaataccgcagacaattttatccaggtgtcagagatacgattttaaaagaatcggcgttgatgatattgccgggagattaaaaaaagtagcggctgccgaggcgataaatgctacggaagacgcgcttgaacttattgcggaaatcggcgacggttcaatgagagacgcgctaagcgttttagacagatgttctgcttttggtgaagagctgcggcgtgaaaatgtttctgaaatagtaggaatagttgacgagagagttttgtttaatataactgaggatgttatttcaaataatgtcagcggagctattgcgaaactggacggacttttgaatatgggtaaggatgttctgacattctttgaggattatatagaacatcttcgttctgtactgctctgtaatgagtgtgaaaaaccggaaagggtgcttgaaaagtcaccggaggcgattgaaaaatacaaatctcaggctgaaagacttactgcaacgcagttgatttatggaataactgttcttaatgaatatcacggcagggcaaaatctatggctattcctaggattgcggcagaagttgctttgataaaattttgtaaacctaaatatagttctgaggttgatgcgcttaatgcgcggattgaaaagcttgagcaattaattggaagaggagctgcggcagttcagctacctgaaattaaatctgaagcagtacatcatgataaaaatcctgacgcaccgccatggaacgctcagtctgaaaataaagatatagattcatcacaaaaaaaggaagaacccaaacctgctacttcgactgaaattaataatatggcctgggatatgtggcctgaggcgttggaagcgataaagcaaagcagcaagagattgtatatgtatctgtataaggcggaagtcatattgaacggtgatacggtcgatattgaagtagggctgaaatcagcatatgattcagttgcaacggctaacggtatagattatctttctgagttgttttcgaaggtagcaggaacaaatttgcgcgccagagtgtttatgaaaggtgaacattcaaagaaggagcaaaccgggagtcaggcttcgataatggatatagtgaacaagaaagagcagtttggagatataataaaggtgaaaggagaacaataacgatggcaaaaggatttccaagaggaatgggcggcggaatgggcaatatgaaccagatgataaagcaggctcagaagatgcaggagcagatggcaaagatgcaggaagagatggaaacaaaaactttttctgctgaggtcggcggcggagccgtttctgcaacagttaacggaaagaaagaacttcaggagattattctcaaggaggaagctgtagaccctgatgatatagagatgctgcaggatttgatagttgcggctgtgaacgaggctatgagaaaggctgataaggacagcgagacgcaaatgaacagcctgaccggaggaataaatattcccggacttatgtaatattttataataatacttatacccccgacgttttatatttcgggggctttttattttaatctattaattttgtatatttattcacaaatcgaatgttgtcgaaatatattgtaatgtagaagatttttaaaatggcggttgaaaacttctgtttgttatgttagaatagtttgcaatggtaaatttatattcagaattaattctgagtttaaaggtttatcatttttggaggaatttgtatggaaatatattttgacaacagtgccaccaccagaccatatgacgaggtggcttcggctgtctttgatactatgagcaataactacggcaatccgtcatccttgcataagctgggcatagaggcagagcgtgccgtaaaaacagcaaaagaaagagttgccgcaggtataaaagcaaacccatctgaaattttattcacatcgggaggaactgaatctgataatatcgcattgttcggaacggcctctgcaaaccgcggaagacacataatctctacgcctttggaacatccggctattattaacactttaggcgaattgagagagaggggatataagatagattatacccctgttgattcaaatggaaaggtaattttaaaggattttgaaaggcttattcggcctgatacttttttggtgacagctatgattgtcaataatgagataggtactattgagcctatagctgaaatggcaaagattttgaaatctgtaaacccgagagctgtatttcatactgacgcagttcaaggatttgggaaagttccgattaacgtagacgcgttaggcgttgatttggtttcattaagcgcacataaagttcacggccctaagggaatgggcgcgctttatatccgccgcggaacaaaaataaaacctataatatacggcggaggtcagcagcagggtatgcgttcgggaactgaaaacgtacccggtatggtaggctttggtattgcagctaaaattgctgcaactgaccttggtaagaaaattgagaggatgtctgcacttaaagaaagattaaaaaatgggattttaaattctatagataacgttagaataaatacgcctgataataatgcgcctcatatattgaatgtatcatttgggggaacaaaggccgaggttgtgcttcattctcttgagatgcaggatatatttgtatccagcggaagcgcatgcagcagtcataaaaaagaaccaagctatgtgttaactgaaatcggcgttccaagaaagatgatagatggaagtattcgttttagtctttcagaattttcaactgaagaagatgttgatattactattgaggcactaaaaaagataattccgagattaagaaagctaaatttaaaataataattttatattaataaatatttttctactttaagataaaaatatagaatggagataaaaatgcagaagatagatttaattttattaaagtacggagagattgctctaaaaggtcttaaccgtcccttatttgagcagaagcttattgacaacatcgcgtctgcaacggctccgattggtaaattcagtatcaaaagggcgcagtctactatctatgttgagccgcttgaagacggtatagatatgatggaaaccataaagcgtctgcaaaaggttttcggcgtagtcaatatctgtccggcagttcgctgtgaaaaaaatatggacagcataaacaagactgctgtggaatgtatgaaatctattgactgcgccggaaagacgtttaaagtagaatcaaaacgcgaagacaagaagtttcctttgaattcgcctcaaatcagcagggaagtcggaggggaaatattaaaaaatgttaaaggcttgaaagttgacgtgcataatccggacatcactgttcaagtggaaatccgcggtgacgcatatgtttttgcggaaaaattcagcggcgcaggcggtatgccggtcggcagcagcgggagagctgccttgttgctcagcggaggaattgacagcccggtagccgggtatatgattgcaaagcgtggagtaactttagacgcggtgtacttccacagtccgccttatacgagcgagcgtgcaaaagataaggtggttgatttagcgaaaatagttgcccagtattcaaggggtataaagctgtatgttgtgccgtttacggatattcagcttgatataattgaaaagtgcccgaaaaattatcttacggttatcatgagaagaataatgatgagaatagctgaaaagattgctttgtcaaacggtgcgcaagcgcttataacgggagagagtatagggcaggttgcaagtcagactatggaagctctttactgcacaaattcagctgtaaatcttccggtattcaggccgtgtatcggtatggataaagatgaaatagtgaaaatttcaaagcagatagacgcttatgagacttcaatccagccgtatgaagattgctgtactatatttgtaccaaaacatcctaagacgaaaccaaaacttgatgagatagcagaggctgagaaaaatctcagcgatattgaatttatgataaatgaggctattgagggcgcagaaattttgtatattaattaaaccaattataatggtttagaataacttatagaaagaggagtttagatgacatttgagttattgtcagtgggaacagaattgctgctggggtcaatagtaaacactaacgcccaatatcttagcagaagactgagtgaattgggctttaatgtatactatactacggtggttggagataatccggacaggctgaaatcggcgcttgagatagctgccggaagagcagacgcggtgattactaccggaggtcttggccctacagttgacgacctcacgaaagaaaccatagcggaatactgcggtttgaaatgtgttatggatgaggaaagcaaggagcggataataaatcgttttcaaaaaggcaattcctatatgcctgaaaataatttcaagcaggcggagatgcctgagggatgtattattttaaaaaatgagaacggcacagctccaggtgcgatagttgagggagaagactgcatttttataatgctgccgggaccgcccagcgagatgaaacccatgtttgacaatagcgttataccatatcttgagaaatattctgacggtgtgatacgttctaaatctttgctggtatttgggtatggcgaatctgcggttgatgagatgctcggagatttaatgaacaattctaaaaatccaactgttgcgccgtacgccaaaacagggcaggtggaactgcgtattaccgcaaaggctgatactgttcaagaagcaaaagaaatgttaaagccaatggaggagaaaattatatctatactcggagacaaggtttacggcagaggtatagataattctatggagaatgttgtggttcagctgctgcgtgataataagcttaaagttacgtgtgcggagagctgcactggtggtatggttgcggaaaagataacaagtgttccgggagcttctgaatgttttgactgtggttatgtaacatattcaaatgagcagaagacagagcttttgggagtgagcgccgaaacacttaaaagcgcgggcgctgtatcagaggaaacggctttggaaatgtcaaaaggcgcgcttgaaaaatcaggagcggatattgctgtttcaataaccggaatagcagggccggaaggcggcaccgatgagaaaccggtagggctagtttatatttctgtgtgtactgaagattttcataaggcgtataaatttaatctcacaggtgaaaggggaatggtgcgcgagcgtgccgctctatatgcgctagatttgattcggcgctgcgccttggggataatagataaagaggctgaatatatttggtgataaattaataggagatggaaaacccatctcctattaattttaataaagtattttatttttacatttaatgcgctttagaatatttgtttatctgtattccgcggctgcgcgccttacgaggcgtacttcgcacgcccttccgatgcttgcaaaaccatattttttatattcttctaagactttttattacataaactcttttttctgtttaatttttattgattttgctttgttgacaataatatgttttaaatatagtgaaaatagaaatatgtgatgatagtgtcagcggctaaatgaacatcggcaggccggacacagtccgccgcgttaggtgaattttatctccgccttcttatgaaagcggaatataaaggtgaatttgtctgtacaaaaatttatgttaataaataatgttgtttgttagagtgtatcttattttgagtttatcattcggtctataacggtcaacgcttcatctcttgttatatagtcgttaggcctaaatgttccgtcttcgtatccgttcatgtatccgcagtttgtcatttttgacaccggtgtgtaaaaccagtcgttaaagtccaaatcattataatttacttcagacttatctgttacttcatatataaattttgaaaaaacagcggcaaactcggctcgggttatattattgtcaggaagaaatgtcttatcatcataacctttcataatttgtttttcgtaaactgaaattactgaatcataaaaccagtcgtctgttttgatatctttaaattcattttgatttacaggtttgcattcatcgacaagcagacgtgaaataatttcagccgtttcggctcttgttaaatatctatcctgcggaagcgtattgtcagtgtcacctttaatgtatttgccggggttctcctttaatcttggtgtaatttcaagagtgtttgcatttgcataataagcaaatttaaactcggcgttatccgccgctttcttgctcaaaacagcaaagattcttttttgggctgtaagttcgtctatcagtccggcaaattgtttcaagtcttccacagttgttgaaatcatttcatcccggacttttttaatgtcgccgtttgttttgccggtcagcgccatggtcgctccatattcagaattattatagtattcatcatattcttttactataggaacgattatcgcgtcaagctctttttgcgtcatgtccagagattttagataatcgtccattccatcccatatctttattgccaaatcaatatccgtaagaccggctactgaacataccataccggagtcatcaaaggaaacgccggctccgtacgcaccgtatttaccgcgcattgttggcagaatgtattttgttgtgagaacttttgcgagaacgttcattttaccggtgtaaagatttttgctgaaataacctgcctgcataaaatgatttgagtcttcaatattagttatcgcggccgcggaatagcagccaaccggcagatttatatgagagttttcagcttgttttgaatttttaaaatattcacagacagcagtcttaaaatcatcgtatccgtttccgccgacatattcaactgttggagcggtgtttaatattatattttgtaccatgtctttaagccttgtcaatatttgcggagcattatgtaaatcggtacctttcaaaaagtgataatacgtcactgaaccttgaccgatactgccgcgggttgatgaatatagtcttttttctgcggattgtgaggagtgcattaactcgtatgaaagataaaaagggtcgcggtatccattttttaaaatctcatcgggagctgttttgagatactcttcaaaatcgttttgattccaaatagagtcgttatccaaaaattctatcactttttcaagcagctcagtaatttcattgtctggcgaagacatggaaattattagctgtgggtcaaatttattttcatcattataactttccatcgatagtatatcaaaatacacatttgaaatatttaacttttgagcttgccttgtcaaaagtgagtttagcagctggatgtaatttaaatctgaatcttgaatagggaataacagactggctgttgaggaatcagttgatagtttttcagtataataaaacggaatattttcaacgttttcatatttgggttcatagtattcaggagcatttttaacttcatcaagcgaaagagaagggatgccggcgataacctcaggcgagtcgggttcatccacccaattattgaagttttccgtatcattttttatattttctatctcctcagaacttagtgacagcgtatcgtcatattcgggcgatttgtttccatttccggatataactatcttgctgtacggattttgaatgaaatatttatctaaaattactctaaagaactcaggattctcttttaaatatttttctgtctctgatatgcctgtataatagaacgggtcatttttatatataattccgtcaaataatgtgaggtccggcgcataaatataggggtcttttcggtttgatatgtattcgccaactgcgctgttcagttcgctgcagtcaaatcccttttcagaaaattgttttaatattgcattataagtgttgattatattatctttttcgtttataggtatttcagtaaccagcagagctgaatttgatataccgccgctgttgccgccggtgacaaaagtcttattgtttacttcattcattttttgcagtatcaggttaaaaattatttctcttgcatatagttcctcattaccttcagacatcattgcgccggaagacataaatccaatatcaacggtttgggtatcggaggtgatattatattcgcttatctgattttcaggcagttgttttgtgtcattaaaggctatatcaggttttttatttgaaaatccatcaaaaaaactgtctaagagtttcagggtagattttatatcctgcttgccggaaatataagtcatactgtttgacggaatataatagttgtgataaacccgcattaagtcgtcataacttaaagtttttataccttcagccgtaccgccgctgttgaatgacgggggtgtgtttccataaatttcagtatataatttatcggataaaaagtttattgagttttcggcgctttctaagttctttattttaagctcattgtatacaaccccgttatattgtacttttccgtcaatatattcaagccttattccctgctgtttgaaaatgttttcatcttgcagcagcataggatgaaaaatcccattcatgtaaacatcaataagattataatattccgttttatttgcagtttttatcgaataataagtgcagtcgtcaacggtgaaagcgtttatcatttctgcgagagagttgctgtttagataattcattatattcttggtcggatatttttcactgccgcagagcaaactgtgttccaaaacatgatttgcacccttattatcaatcggcggcgtcttaaagccaatagaaaattccagtttttcggagtcgttttcaagaaacacgacttcggcgcctgtttctgtatgcttatagtaataggcttttccgtttaagtcggaaatatcttttgtgtccagcagttcaaatcctgtttcatcatctaatgcgtaggcaggatttaatcctataaatattgaaaaacatagcagtattataaaagtttttgtcagtttcatattattttcactcctgtgcgtctattatttcttttgccatatttatgagttcgtctttagtgagttcagaatcagcggcgcaaatgctgtagtttaagccattatattcaaatgataggatttgtacgtcagatatttttatttcggcgcttccatagctaaatatatatttgcctgatttttcatcctttttatcctgctcagttaatcgataatctccgggaaccaatttgtttgtatatgcaaaatattttatatcgcttcctttatatgtttctgctgtgttagaatggttactttgatttcccgaagttgatttgtctatatcaagagaaatcatgtcttcattacgtttgtaatggcaatttagtgatttatagctttcaaaaattcttccgtcttcgctgtaatcctcgttctcaacaatataaccgctgtcaaaggtatatccgttcgaaaagttatttagaatttttgaagagataccaatatcatcttgaagtgtttctgctgttggaacgctgttatatgacggtatatttgaagattgagcgcctcttgaggtgattaacacatttgccgcccataccgagagacttaaaatcataaccgccgccgctgcaacagcggctatttttgatatttttaaatgttttactaatttaacagaattttcagcctctgttatcaaatcatcatctattaatccaattgttttgtatagctcctttttattcataatctaattccctgcctttccaggtaaatttttaattcgtttctaagtctcattaagatagactttactttgctttctgagaatttgtaatctttcgctatttttgaaattgagtctgaataccaataccgctttacaaatataactcgtttggttaaactttttgttttaagaaaatgactgataaattctgcaacttcacgagcttcatatttttcctccggcgtttctccgcctgataatatattttcaagttcagataattcagtttcaaattcacggttgcgcattgccgctgaataatagtcatatttgttgagcgctatatttcttgttatacgcccaagaaaagcgggcaggcagcgtggtttttgaggcggaatctgattccacgccgcataatatgtatcgttttcgcactcctccgagtcggtgatattttttaaaatgttgtatgctatagaatttatcagcctcccatacttggatgatgtttcagggatggcggattcatccctattaaaatataaatctattatttttttgtcgtccatggcaagagctcctttttatttttctgcctcaaatatatagtaagaaaatgataatgcttggttgcaaaattttgtaaattaatttttttcagatttatttaaaatttatattttaagtgttagcatatgaatattgtattttattatcgcctaaaagtctatcaaaaaacaactcaattttaaattttattctccctggcactttttgtcacttaatatttattataatgactataggtcaataatttaaataaataattaaaatctgaaaggagaaaaacatgccgaatttaactacgcctatacctccaaagcttacaggagctgcaggagatgatattaaggcaataaaaaaatgggggacggcgcttattgatgagctaagctatattttcaataatttggacgccggaaacgtgtcggaagcggcaagcgtaaaagctgaaaatattgatacttcaaacgctaaaatacaaaatgctcagattggaaatctaactgctgataaactcaggacgggtcagctcaacactaatttagttacggttgagagcgacttcgggaatctcagtatgagcggaagttctataataataagcgataataaagaggagcgttttaaggttgagtatgacccggatacaggtctgtttagttttgtaattaataactcagaaggaaatccgactgtttatataaacagttttggcaacgcggtattcagcggacgtgttgacagctcagagattttctcttcaactatagtaggcactgacagtgtttcatatctgcaaaaggatggcggagtttttgcggagatggatacaaagggtataaaaatacttcaggataaaaaccaaaagcggctgcaaaaattgggtatgtctgttggcgatgacggaaccgcttacatagtcttaggttccggagacggttcgggggaggttactataaacggcgttaaatactcaaacggcagttttgttatacaaaaaaactcgacatattcatcctttgggacagtgggaggcagcacagttttatcttttatggatgacggcgatttatggattcgaggcgatagagtattgataaacggaagagacgtattgaaagagattgatgaaattaaaaaacaaatataaataaaaaggagtaaaatttatgaaaaatgataggtacagcggaaaaataaaatcagaattttttggaaaggttcaggagtattttaaaatttatagggacaataaacaagaactggatcacagaatcattgataacaacaggtggtataagagccgttataattccgaccctgatgcggtgataccggagccgacaacaccttacttattcaatgttattgcaaataaacatgccgacgccatggataactatcctgaaccaaatattttggaaagaagcgaagaggatactcaggttgctgaaaagctgacaaaaattcttcctatgcagctggatttgtgtgattttaaaagaacttacagcagggcttggtggtataagctaaaaaacggagcttcctgttatggcatattttataatcccgattccggcaaaaacggcgatattgatataaagcgcatagaccttttaaatatgttttgggagcccggaataatagatattcaagacagcaagtttgtatttctgacagctcttatagaccgtgaagagctgaaagttaaatatcctcacatggcggataggtttaccggcggaaactctatggacatacttacatatgacgatgtgttaggaggacccgaccaaaatattttaagggacaagtgtttggttgtagactgctattataagaagacggacggagaaaaacaaactgtggagttattaaaattttatgatggaaatattttggaagcatctgaggatataggggaagacggtatttatgaccatggcatgtatccttttgtgttcgacgttttgtatcccgacgaagatagtccggtagggtttggatttgttgatatagtgaagaaccctcagttatatattgataagctggacgggcttatcagccgaaatgctttgatatccggaaaaaccaggtttatggttaaagataacggagggttgaatgagtatgaattgtctgatttaagccgtgatattattcacgttgccggttcggtaagcgacgaaaatatcagggaactgcaggctaagcctatgcatagctttattattcagcaccgtcagaataaaatagaggagctgaaagaaattgccggaaacagagattttcagcagggagatacgcatggcggagttacggcatattccgcaatagtggcgcttcagcaggccggtgaaaaactcgccagagatatgctggtaacaggatatgacgcgtttagagatattatttatttttgtattgagctgatgagacagttttatgatgacccgcgttcttacagaataaaccgcagcaatggaaaaggcgagtatgtaacattttcaaaggatgatttggaaaatggttatcatagggctgagtttgatatatctgtgagcgctgaaaagaataacccttacagcagaatagcccaaaatcaaacattaacggagctttggcagatggggatatttgacccgaagcaggcggacgcgtcaatactaatgctggaagccatgcacttggatggaaaggaaaagataattgaaggacttaaaaatttaaaggctgagtatgaagaaaacataaatacggagcttgaagttaatggtgaaaaaataaaatcaccgcagcacaagccggctgcggtgggtgtaaaaactgcgaatatacaaaatgcaacacaagtttcgtaatcacattattactttcccgaatgtatagataggttcagaatcattgaaaaatatgggagtatatctgggattgattgaagttagacacggacggccgtttattttatcaagttttttacaatatgcgtcaccattgtatagaaatattcctatatctccaaatcctatgtgaggcatatatttgatataaactatttcaccgtcacaaatatccggttccatgctgtcgcctgaaatacgtattccggcgtctgcttcaggaggagcgggcaattccattacttccatatcatcatcggttatataattgcccagcccggccgctgccggctgcatgtatacaggtataggccgcattctgttatgaaatttaataactcgtttatccaaatatttgttgtattcataatttaaacaattaagtactgcttcaaaattttcagggtcacgagagatttcacgcagttttgtgatagctagattgagttcagtattgtatttaaatttgttgtattcagtatttgcgtcgcaaaaaaaactgtatacgtcatcaatgttatattcccggcaaagttcaagaaatgttttgacgtccggttcggaaataccattttcccaggcgctgaatctagcttgttttataccgaatttttcatagacctgtttttgggaaagtccggaattgtatcgtgcctgtttgagttttttactcaagtttttatttgccatataatcacctcctgtcataatatatcacattttgtagaattaatcaaggaataaaatcgaaaaatttgttattttatccttgacaaataaaaaatttgttatataatggttgtgataacaaaaaaaatgttgggatttggtgtttatggtaataatgtgtaagtaaaaaatgttagtcttatattttaaatcaggtatttataaacatttatataggataaaaaattatttttttaaaagtaatgtgaaaataaatcacaaaatttaataagaaaggaatatgaatatgacgcatcccgacataaagtatatagaacgttatggttataccagaggggagctggaacgcggcaggccggtcggtatatgcctgttttgcggcagtgaggtttttcagggcgatgaggggttcatcaagagctttgacggtttgttttgtaatattgaatgctgccataactactatgaaattgattcacaggagtaaatgtgaataaaagaaaggagaatatattatgaaattttcaaatgcagaccaagtcaaaaagtggctgagattgctgccggttgcgagaaaagaaatgaatgctaaaataagtttttataatcagctaataaatgattttacaagagttgaatatactgagaatgaaatagtgagaaatggattatcgaaaaatacatataaaggtgaaattaacaatgttcatttttaccgttctcagattgaggagtgcaagaaaaaatatgataaactgctgaaggattgggaaagactttcaaaattgttagacagcgaagagataacattaataactgaaaaatatttgaaaggcaacagttgggactctatggaattcgttatgttttacagccgccgccaatgtttcagaatacttgaaagagcggctgaaaagttaataggcgagacggttggagaataatatggcagagtttgttaatgagaatcataataataaaaacgaccaatccaaagaatatataaataaagatttaaataatggggaaattacaaatgttataaaacagagcgaggaagttaacagagcgatggaagctttaaataagatacaggaactgctctgctgcggagacaaaagaattgaattatctgcggctaaggagatattaggtcagcttggtatgcccggtgaacttgggggagaaaatgaaataacaaagcttgaagttgaaataaaggttatataggatggggtatacaatatggattcaaaattaaagcttgaaatcacaaagacgcagcttaaatttatagagtcaaaagctgatgaagtgctgttcggcggcgcggccggaggcggcaagtcatacggacaattagttgacgctttattatttgccttgaaatatcccagaagtatacagctggtattgagaagaacatttcctgaacttgagcattctttaataatgaattctcttttgatataccctaccagcgtggcttcttataaggtgagttccagaaagtggatatttaaaaacggctcggtcatcgaattcggattttgtcagtctgagacggatgtgctgagatatcagggagctgaatatgacatagttaggtttgacgagctcactcactttactgagaaccaatatacatatcttttatcgcgcgtcaggggaacaaacgggtatccaaaacagataaaatccagcacaaatcccggcggaatagggcataattgggtcaagcgaagatttattgacggatatgagccaggggttgagcataaaactgaatttgatactaaacgattgtttattccgtcttttgttcaggataataaatttttgatgaatttggataaagactatataaaaaggcttgaacagcttcctgaaaacgaacgccgggcgcttttattcggagaatgggatatattcgacggtcaggtgtttaccgaatggaaaaacgacataagaggctataaatcaagaaaattcagtcatgttataaaaccgtttgaaattccgaaagagtggagaaggtttagggcgtttgattttggttattccaagccttttgcggtatcatggtatgctgtggattatgacggcagagcatataattaccgtgagttatacggctgtgccggaaagcctgatgttggaataagatggacggcgcagaaaatagccgataagatacttgaacttgaagaagatgagacaaaagccggatgtaagataaccggaattgcggatccggcaatatggaacgctacaggaagcgcagaggggagtattgctgagatgatggaaaaacgcggagtatattttgaaaaagggaaaaatgacagactggcaggaaagatgcaggtgcattacaggctggcttttgacgctgaaggttttccaatgctttacttttttgaaggcaaatgttcaaacatgataagaaccttgccggaactgaagtatgacagtataaaccctgaggatgttgatacaaaacaggaggatcatttatatgacgcgcttaaatatttcctgatgtcaaaccctattactccaaacaattttgatacttctgataatattgaagagtattctcctatatggactgaaaaaaacagttcttttgaaagatttatagtataaaagggttgtaatattttaggaataatggtattataactttgatattaatttttgtttggaaattgtaaacatggaggattaaaaccgtatatgaagagtttgggaatagatttcggagatagcagaactggctttgcagtatctgatgaattggggttcggcgccggcactttggataattttaagtccggaagcatttataaagttgccgaatatgccgctaaactttcgaatgagttaggagtttccgaaattgtagttgggtttccaaagaacatgaacggtacggttggggaacgcggagaaaagactaaaatgtttgttgaaaaactggaagagttggtagatgtgcccgttattctttgggacgaaaggcttactaccgtttcagctcataatttaatgaacgttacaaacgtcagaggaaagaaacgaaaagagtctgtcgacagtatttccgccgcctttatattacaatcgtatctggacagcaaacgttgagaaaggagcagtaaaaatgtcagatgaaaataaagatgtaatgcaggaagaaaatcaaaatattttagaattagtagatgaggatggaaacacggtgccttttgagcatttggatactgtgcaaattgacggcgaggattatatagtgtgtattccatataatgaagaagaggaagaagttacagaaatcgtattgtttaagatagataaggctgccgagagtgaggattgtttgtctcaggttgtagatgaaaatttggcggagagaatttatcaggaatttaagaagcgtaatgcggaccaatttgattttgaaaattaaataatatataaaagcggcctttttataaagccgctttttgttattcaaataaattcgatatttacaatcctgttttgctcgtcccatgtaactgcagctccgcaagcctccgatacagctctgagcggtaacattgtatagtcgcttaacagcatagcaggtgcgtcaagttcaatttcccaaccgtttttagtcattttattatcattgatttttagagatatttcggtgccgtttttctttgcggttactgtctcatttgtctcgtcccaaattacttcgactcccaaagtttcaaatatagcgcgcattggaaccattgttctgtcgtgaataataaaagcaggctggtctgaaattagttcctcaccatttataaatacaggaacttcagggtaattgactgtttgatttgagtcttttgaattataagttattttgaaatcttttgagtcaagtttttggtttaaagaatatttttcaaccgttaatgtatgcgttccttcagataagtttgacgaatcaagagtaaactcataaggaggatacattgtttcatagagagaaacgccgtctattaggtatttgacgtttaaatacaacgctttgggttcataggcgtaggcggataatttaagactgtctttaacttctatgtcgtgcatttcgggatactcgacaggagaaaatcccggatatccctggatgtatggaggggttgaaaccgccgaattaactattgagtaaagttccggcgaatcactcatgtcatatctgtaaaaatccaaatccacgttatggttaaagcttacgtttattttaatctgcggaaacactctcggaatctcataataaaattttctgagctgctgtgctgcccagtcaacatattcaaaaccgtttatgtagtcttcacgtccgggcatttcgccgtaacctacaccgccttcagttataacaaccggcttttttatgttatatgtttccataaaatcagttattgctttagctcctattacagcattgctgtagtcgccggctacgaaagagacgctgtttgaccatgttgtctgtgctttgcttccctgaaagtatggcattacatataaactcataccaatccagtctgtatactcatcgccgggataaaaatctatcagtcttaaatcgaccgaaccaacattattcggcgcccaaacaaccgcaatattatcctttgtgtgggcatagtcggctacatatctgaaaagctttataaagctttcaggatgagtaaaattatcgtttatattaaactctttgccaaataccaaaaggctgtcattaccgtctgaggctatgttatcgacagtatttttaatgtagttttcatagtctgcaggttcaataacttcgtcttttaatgcacagttccaattataaagcctgaattttccgcttctttcggcatattcagatatttcagctctttcgcatacgtcatttgttaaagtcgaatcaaaccaaaaatattcagtgtctatagtgttaggaatcgaaggataagacacgtcgtggggtgtaccatggtacaccccactgccgggttcaaactttgctccgtaaaaacatctgttttcggtttttgcctcatagtatattctgaaatccggcgtctcgcagagcttacccattctgctgaccgtttcatccattatactctcgcattgcaccggtgtgcaaaaaggtataataaacagtaaaaacagtgatataccgagagagcgtctaagaaagtttaaagtttttttcatattatatatcctaataactaagtttatcttatgcagtctgtacattttggctgttatcgcgtataccgcggagatactcatagaagtttgtataagcggtatttatgtatggcgataggaagatgtagccaatacctaatgtgacagcggccaacaaaatccagccgataaagcttaggctaagtacaaataacttccacttataacctttcatcatttctttgctggctctcagtgcttcaagagcggtcatatcatcattgtccgcaagcagataaaaagcttgtgagtatctatatgacgctatgatgccggggattaccaaaagcaatgaccataggaatgtgaatatcccgattaagagcataagcaggaaagaacgcattattgtattaaatccataagaaaatcctgtaaatatgtagctgaactccgagttaccggttcttacaaggttcaggagatacttgctcataccgtacgtcatacatcctgatacaaacagaaggacaatagtgccgattaatgagtaggatgttacaaatataaacgttccggctgatacatttgagcccatactaatcaaattcgcagtcatttgcgcaggaaagtttactacaatgctgacagccataactaccagagttgcaacaaacaatgcaattatagccttgccccacttaccgcgaagctgatttaaagataaatttttaaaatctttgcatgtcataattcttactcctttttatattataatatatttttttattcattttttacaggattttacaaagaaattataccatgatacaggatatttatcaagttacttttttattacgcgcggcgtgtttttcaattcaataattgatataaattgtatctaatatttcttgttcagtgcgcagtcttttttgcttatctatgtatatttaaaattatcatgaatatgattaagagatataattcagacaagcgtggaggagaagaaatgattgagagaagctacaaggcaagaaaaattccggaaaaacatcagtaccgggctgttgttatcgacggacataaaattataaaaacagcagtttttttagcggctgtcggagttattgtcggcgttataataacatcgttttcatatactaaaacagctgttccgacagcgtctcatgttacggaatcgcaatctgcggaggtggctcaggaaaatgtaaagcaggacagcgaagaaaaatctgaagaaaggtctgataaaaaaataaatataaaggagtcatttgattcagttttaaaaactgcctgttcatacatattagggtttgacccatacaatattaacggggctttagctgcagaaattcatggagccgatatggttaacagttatgaaatggttcagaagtcttctgaatttgacgaaagcaatattgtcccgacagaggaacctcagccaacaccgggagcagaatcgtcggccgacggtgagaatcaggcggacataaaagcgataaatgcaggtcagaacgcaaacagcaattccaatgagattaaaatagggaaccaaacttcatacggcgtagatataaataaaatgctgagcgaaccgcttgatattgatatgagcgtcgacggtccgaaagttctgatagtacatacacatgcgacagaggcatatgctcctgaaggagctcaaaagtataaccgcgaggagagcgacaggagcatggagaatactgagaatgtcgtagcggtaggcaatgaggttactgaaatatttaacagccgcggcattgaaaccttgcatgatacagcgctgcatgattatccgtcatttaacggcgcttatgcggacgcactttcgtctattgagtggtatttgtctgagtatccaagcatacaggttgtttttgacctgcatagagattcaatagtttatgatgatgatacaaaggcaaaagtggttacaaaaataaatggtaaaaatgcggctcagctaatgtttgttgtaggcactaacgaaaaagggctgtatcatccggactggcgcgagaatttgaaatttgcactgaaactgcaggataaaatagaccagaaataccctaacttaatgaggcatgtaaacttaaggcaggaaaggtttaacggacacacaacccacggaagccttatcattgagatggggtcaagcggaaacagtttagaggaggctaagtacggtatgagctgtgccgctgaatgtatagctgacttcttaaatgaacttaaataataaatttaacataaatgtcacaaactttaacgtattagtatgcaaattttgatactaatactcttgaaaaagattcacctttcagatataatgtactttaaaagaatttggacgcggagtaaattatttcttaaatgtattatgccgaaaggatgaatttaatgagaaaactattggctgtgtgggcggcgaagcttgcgtcggtggcaggcaggattgttggcaaaaaatcatcgtcaacgccgggtgtgtgcgctcttaaaatttgccccaatttgataagtattttagccaagaatgtcacaaaaggcgtgattgttacatgcggcacgaatggtaagactactacaaataacttgctgaatactgctttgataaaaagcggatataaaacagtttgcaataacttaggcgctaatatggtcggaggtatagcgacaacctttgctcaagcgtgtaatatatttggtaattttaaagctgactatgcagtgcttgaggtggatgaagcttctgcaaggcgagtgtttaaacacatcaaacctgattatatgcttataacaaatcttttccgtgaccagcttgacaggtatggagaaattgatataacagttgatttgcttaatgaagctattgatatggcaggagatgttaagctgatattgaatggcgacgacccgctgaccgctcagtttggcgaaggcagagacgctcgttattttggtatctcggaacaggtgcttccacagaccgatgaaactaaggaggggcggttttgcgcaaaatgcggacaggaacaggagtataattattttcattacagccagctgggcgactactattgtcctcactgcggaaataagagacctgagattaattatccggcaaccaatgtggacttgtcgtcgtctatgaagttttctgtaggtaataatcaaatagatgtgaattaccgtggattttataatatatataatattttggcagtatactcagctcttgatgttatgggtgttaagaccgagaattttaacagtatacttagtgattataagcctcagataggacgtatggagctgatagaactgggcggaaagccttgtatattaaatttggccaaaaatccggccgggtttaaccaagctattcagaccgtgcttttggataagagaaaaaaggatgttatcgtggctataaacgaccttgcaaatgatggaagggatgtatcatggctttgggatgttgactttgataaattgggagaagctaatttatgcagtctaataactacgggaataaggctttacgacatttctctcaggtttaaatatgctgatataaaggttgatatgattacctctgatatgaaatcggcgcttaaaaaatgcgtggacaatcctgattcagaagtatgttatgttctcgtaaactatacagcgttatatcctacccaaaatacaatgttgggtcttaaaaaagaattgggcagcagcgagcttgttccggtcagtgcaggaggtagcagcaatgggaaataattatgagataaacatcgttcatttgtatcctgatctgcttaatctctacggggacagaggaaatatagcctgtatggaaaaaaggctgaagtggcgtggaattgacgctaaagttcatatgtgtacaaatcaggacagcagcattgatcttaaagcagctgatattatatttgtaggcggcggttcagaccgtgaacaggagatagtttgcagcttgcttctcgaaaaaaaggaagaattaaaagcgtatgcggaaaatggcggcgttttggtagctgtttgcggtggttatcagttattgggcaaatactataaaacggccaatactaaaatagaaggattggaaattttggatatatataccgacgcgggagataccaggctgattagtaatgtggttttagagtgcgaaaagtttgaccagcctatagtagggtttgaaaaccatgcaggaagaacatatattggtgaaaaccacactccgttggggaaggttaaattcggaaatggaaataccggagacagcggttatgagggcgtaatatataaaaatgttattgccacttatcttcacggacctttgcttcctaaaaatcctcagctatgcgattatattttagaatgtgcattaaagcgaaaatatgacgattttgatggacttaagcccctggatgacgaacttgaaaacaaggcgaataaatatatagccgataaatatgtgcgttgatactgtataaatttgtcttgataggcaaaaaatatttttaactaatggtaatagaaaattaatattcacttaacatttatttggaatatttttgataaaataacatggttaatatggagcagtgtataatgttggatattaatacccgggaaaagtgggtttgaatgcctgaggtccggcctattacatacagggggaaaacgaatggatttttttaaaaagttgttttccaaaaaaaacaatgacaaagataatatagaacaggatttcttaaatcacgcttataacagtcttggagaagagcatcttaatccggaaagaattttagatgaaaacagcgtaagttataagactgattctgaaaatgagattgccgaaggtgagcctgtcggcacttttggcgttcatgaaagcgagtatgaaaatgatcgcacagaaaacgatgaaaacaaatttttgaaagaagcttcagagcatgagaatatcggttttgaacaggataattttgaagacagcggatatatatatggcgaaggtaaaggtttagatttaaaaacggattatgaagatattgaagacagcggagaaaattcagattttgatgaatatataaacgaagatgaagatataagcgaaattgaagagtttgaccctgaatcggcatatgataacctaggcggcgataccggggaaatggatactgaagctatcagcgctgcggctgatatggcacagaatctatctgcagacgaattgtctgacaggagagcggaatacggacgagattttataccctctgataattatatttcagaggaagcacaggaagaaactttttctgtatctgacgaagccgggaataacggttcagatattaatagtttgtctgatacgagggaacttgaacaaacaattccaataagcagtgagatagataaagaagagatttactccgcatatgctccgaagaatatgcgtcctaaggtaacgcagacatcgtattttgatttggataatttggatgatgaaccggaagaaaatttgtctgataaaggttttagagctttctgcaagagacgtaaaaaatggcttataggcgccggtgtagctgcggctgtagttttagttattgtcggaacggttttcttcttctggaatcgtatggaccctcttatgggatatacacaaacgtatgtagctaagggcaacgtgattaaaactatggcagcaggaggaaatgttgagcctaacgccagatatgatataacttccttagtcagcggaactatcaccgagactcctcttaacgcaggggagcaggttcgtgccggtgaactggtttataaaatagatgatacaaacgcacagctggcagttcaaatggccgaaaatgatgttaagcgtgctaaggtggacgattcagattcaggttcgtcacagcagcttagaatttatgctaacgcgtcaggaactataagcgatttgaatatttcagccggaagcagtataacaggcggtaagattgcaactatcacgcaggcaaacggaacagaatttgccttgataccgaatgttacaggaacagttcagtcagtaaatgtcaggaacggttcaactgttgagtcgggtcaagtggttgcgactttaaaaagtgacggcagcggctcttcaaaagaggggcgtgagctggatatagcgtcttgcgaacttgctttagagcaggcaaacaaggaacttgaaaaatataaaatagctgctcctatcgacggcacaatactggttaagaatgcgaaaataggagacaacgtgaacgctaatcagactgataagccgttaatggtaattgctgatatgagtaaaatgaagtttaatattgaagttgatgaacttgaaatctggaatattgaacttggtcaaacagttgttataacagcgaatgctttgccgggtcagactttcagcggtgagattacgaatattgccggcgaaggtgagaaaaagggcgacggcgttaccacttatgcagttgaaattacaatttcagacccaggaaaaatcaaatccggtatgaacgttgacgccaaaataataattaattcagcaataaatgttttgtctgttcctgaacgcaccttatatgagtctgacggaacaaacgcattggttattacaaactctaacagtgctgaagaagacgctgtgatgaatccggcggaatatccgaatataaatgttcctgaaggatataagcttgttaaggttcagtatggcgtgagcgacggcactaatgttgagattatttccggtctgtctgttggagatacagtcctttacaaagcagaagacggtgaaaatgttaagcctgcggatagtgttaattcaggtaaagattccgggaataaagaagcagaaaattcatctaacaattcagaaaattcttcaaaaactgataaatcacaaagtggtgacgcagactcaattgatgaagagtttacaactgaaagcgataatggtgaaaatgtcaaatcaaccggaaaatcagcgacccaggaagatcttaccgatttagagtaaaagtttttaggggaaatgcgtaaatgagcaataatgagaaagaaaaattaaatgataaaaaaagcggaatatttaagagtgcgtttttaaacgcactctttgaaataaagctgaataaaatccaggcgcttatatcggcggcaggctttcttattgcggccgcttctatgatagctgttataatagcgacgcattctatgataatttccgaaggatataggactaatcctttaggagctaatactattactcttacagtaaatgaagaaaaatctaaagtaaaaatagacggcttaagaagctctattttggaatatgatgattttatagacgttgtgccaactgagacggtttctaatattgaaatgtttggtaacttgagtacaagttcatattataatgtgcttgcaacagactattcgttttttaatcattcggctttgactattgataaaggccgttttttctcgacagcagatgtaacggcaagaactcatgttgcagttatcggcagtgatattgctaaaagtttgtatggtgattccgaccctataggacaggacttaaaaataaataatcagatttttagcgttgtgggtatattcgacagcgaaagcaaatcgtcgctgaatgaaaccgtaattataccatacaaaagcgccaggcttattttaaattcaactgacgttggaacctatacttttgtgtgtaaggatgggtttgaatcagatagggcggttaatcaagcggaaagctatatgggtaaggttttctcggataattctaaatactcgataaaatcaaattataacagcggtatggttagcgtaattcggcttattgttcttatagtttttcttattatactaattataagctgcttcagtttggccatgtttgccgcttatccttcaagaaccataaaaactgatttagatcaaacaaacaaaaagaatggttcagcatatgtttttcttaaattagagtatatttgtcttttgatttctattgcaggaacattagttggtttggcggcaggaatcggagccggctgcctatattgtctcttaaccggtaatcctctgtattttaacggcggacttttatttatgactgtttttttgttcttgctctctttagtatttggtcttttgtcaggtttggttccggggatattagcgtccaaaaagtttaaacgcagtgaaataaaataatatttataatattactttaatataactattaatagttatattaaaatctgtttttacataattataagtaaattttataacactttattatcgtaaattaatttatcttagtaattaaatttaatttgttatattttgttggtattctatatttttagtaaattaatgagacaaattattgtgtaaatatatttgcttttttttgtaagctgtgttattatgttatttatataattggaataatctggaaacgaaggtgttgttaggtgatagaattatgactgacacagccagaaaactagaatacgataacatatcaggtcagcagaatgaagtgaaaaagaaacttaatattattaaaaaaattcccaaaattgagctagtgtggcgcgtagtatggtgcgttgtttttatggtcatatttagtttttttgcttttggcttaattcgattaatatttggggactcggcgcatggattagagtggattgttgcagttgagacagctgtgattgtattttccgtctgtctttttagctttgcaatacggatttttaaagaattaaaaaatgttgtcgatgaggatacggaaatcatgacaaatgttgtcgggggaactatggtaacatacttcgacgatagttttacaataataaatgctactcctgtcttttacagcatactgggttatgaaaaaaatgatataaaaagaaaatatcgatgtgaattttttcgtctgctggtgggagacgactctaggcgggagtttggaagacaaaagcgcatgcttcgcgaaacgggtttttcagaggctcagtataaaattctcagaggtgatggaagccgtatttgggtttccagcagaagtcatttaaagaaaaatgataagctggaaactgttgtatatactgttttattcgatataagccgtgaaaaaaatatgcaggagaaactgcagctggcagaggcaagaaacaaaatcgtattggagaatatcaacagcggtatttttgaatgggatatgataaaaaatacgtttgaggcttccgaccagttttcacgcagatttatggttgatgaaaattttaaaattgaaaaaactattttgaaaaagtttgtgcatcctgatgatatatccgtgctttatgataatttaaaacttctaagagagggaatagaagataaccttgaaatattgctgaaattaaaggattttcaggggatttacagtcataacaggttagttttaagttcggtgcgtgataataataatgtccctgtaaaagcggtaggaatagttattgatgtggaagaacagtttcagaaagaaatggagcttaaaaataaagcttccagagattcgctcacagggctttataacaaagggattactcagcagcttatagaaaacactatactagaccgcggaacacaaaatcatgctctgattttatttgatatcgatgattttaaatcagtaaacgatacgtttggtcatggtatcggagacgaagctatcagaatagttgctggtttgtttaaagacgttttttatgatgattgtattgtcggtaggataggcggagacgagttcatggtattttgcagaaatattgatgagcgcggcgtcaaggtggaacagcttcttaataaaatcatggagcgggatacatttgtaaagtccggcgataaattaagaaatttaactttaagtgttggtattgccctttatgtcagtgacgcgagaacttatactgaattatataaaaaagccgatattgcactctataaggcaaaacaaaatggtaagaacagatacatattctttaaagatatagatgaagattaataaaaatggggctgagagatgatgtgctcaccaaagtcagactaaaaatctaacgttgggagggcgcgtcaatactcagcccttttgtttttaaataaaaaagacaccgcaatcagcagtgtctaattttttacttttcaagaccataacgttttctgaacttatcaactctgccgcctgtatcaacaagcttttgctttcctgtgtagaaaggatgacaagcagaacaaatttctatacggatgtcctcttttgtggaaccggtttcaataacgttaccgcaagcacatttgatctgtgtttgcttgtaatcaggatgaattccttccttcatcgtgtttcacctctttcaatatataactcaattatttatccatttaattagcaacgtcgtctattatagcacaacggaaatcaaaatgcaacacttttttcaaaaaatgtaaatatattttttgttagtctccaagacacatatcaatagctcttgcagtttttatccagtaaccgctctcttctacagctttgttttttccgattacgttttcaagagagtcataaccaagcttagttccgtctaaaactaccatattgccgaatttgccttccatcaacagcttaaccgcgtatgaaccgtaacgggttgacaagattctgtcgttagatgtgggtgaacctccgcgctgagtatgtccaagaatagtagcgcggcactcgagaccggctaaatgttcaagctgcccggcgattacttctccaactccgccgagacgtattgggtcaggactgttatcaataactttggatataactacgtctcctccaataggcttagctccttctgcaacaacaacaatagcaaaattcttgcctctggctctgttttctttaatagcgtctgcaactttattaatgtcgtatggtatttccggtatcaaagccgcgtcagctcctccggctatagctgacgctatagcaataaacccggcatatctgcccattacttccacaacgatggttctgctgtgtgattcggcggttgttcttaatttatcaatagattcagttgcggttgcaacggcggtatcaaaaccaaaagtggtatctgtcgaagctaggtcgttgtctattgtttttggaacgcctataactttaactcctttgcgcgcaaaatcacggccggacgtaagagttccgtctccgccgataacaataagagcgtcaataccggctttctttaggttgttgactccaacatccgaaacatcgccgcgctgttcttgtccgtgttcgtcaatatatgaatagtcaaacagattatctttgtttgagctgtaaagcattgtgccgcctttagagataattcctgaaacatcatgaagagtaagaggaacaaactcgtcttcaccgagataaagcccgcggtaaccatgttttattccaacaacttcaagaccgtatttgaggatagccgtcttaacaactgctctgattacagcattaagcccaggacagtcgcctccgccggtcataacaccgattcttttgatttcgctcataattagccctcctgtatttatgtattaaggcaaaattccgtatagatattatttcctatcttatattctattatgtttaagtaaatatgtgcaaaaattaatttcagagttcttatgcttttaaaataaagccgaaaaaacactataattctgcctggtgctaaattgcaccacgtaatctattttaacttatataaaagcaaaaagcaaggagaaaaaccgagtggtgtctaattttgtatactgtaacaaaaacatatttaaactgcggtgactttttcataaaatcacatactgaaatatggaataaatttttattttaactgtttatttacattgtgtggcgtttttattactttttttggaaaataaataaaaaaactgtaaaaaagatttaatttaatgttgcgtattttgaaatgttgagttataatacaaagtgcgggaagagggacccgtgaacccgaatgtttcggtatttggggcttgttcgaaaaagaattattttatatataggaggattaattatggataaacaacaagttttaacaaaaatgacagatgctggtcttgtagcggttgttcgtgcatctaatgctgaagacgctataagaatcacagacgcatgcctggagggcggctgcccttcaatagaattaacatttactgttccgggtgccgctaaggttattgaggctcttgcttcaaaatacacaaacggcgagatgcttttgggcgcaggaaccgttttggattccgagacagcaagacaggctattctttcaggagctaatttcatagtaagccccggtttcaacaagggcgctgcagagttatgcggacgttatcagattccttacatgcctggatgtatgacaatcacagaaatcttgacggctatggaagctggatgtgatatttgtaaagtattccccggagacattgttggagctaactttattaaggatgttaagggtcctttgccgcacgctaaacttatgcctacaggcggagtggacgtatcaaacgttgataagtggataaaggccggcgcagttgcagttggagcaggttcatctcttacaaaaggagctaagacaggcgactatgctgatattactgctacagctaaagagtttatagcaaagattaaagaagcgcgcgctgcactttaagtttttgaagagataatttgaaaagataattagtacatatttgaaattaaattatacaaataaaggagaaaattataatggctaaagttgttacaatgggcgagattatgctcagattatctacacctggtaatgagaagtttattcaggctgatgagtttgacgtatgttatggaggcggcgaggcaaacgttgcagtttcacttgctaattacggacatgacgctgagtttgttacaaaggttcctgataacccaatcggagaatgtgcggttgctgcacttcgcaagatgaatgttaaaacagataacattgcaaaaggcggagagagactgggtatttatttcttagagtcaggcgcttctatgagagcgtcaaatgtagtatatgaccgtgctcattcttcaatttctacagctgaagctgctgattttgattttgacaagatttttgacgacgctgattggttccactttacaggaatcactcctgctgtttcagacgctgctgcagaattgactgaggaagctttgaaagctgcaaaggcaaagggcgttaaggtttctgttgacctgaacttccgtaaaaagctttggtcaagtgagaaggctcagaaagttatgtcaaacctcatgcagtatgttgatgtttgtatcggaaacgaagaagacgctgaaaaggttctcggatttaagccgggcgctactgacgttacatcaggagaccttgaacttgccggttatgaggacatatttaagcagatggttgagaagttcaactttgagtacgttatcagctcattgcgcgtaagtcattcagcatcagacaacggctggtcagcttgtatctattcaagagatacgaaagagttctatcattcaaaagagtacagagtacatcctattgttgaccgtgtgggcggcggagattcatttgccggcggtacaatctgcggatttgttgacggtaagaattttaaagacgcacttgaatttggtgttgctgcatcagcgcttaagcacacaattcccggagacttcaacttggtttcacgtgctgacgttgaaaatcttgttggcggcgacggaagcggccgtgttcagagataattaataattataaaaattgcctgcaccgtttggtgcaggcttttttgttaattaaatataaatggcaaatttgtattgcccaataaatataagactgttgaatttttggaattatattaacatactataggacagtcctcaatattattgattaattcagaagttatgctgtttattacatcgaaattcatagcgttaatatatattgattcaagttcatcgtgcagagtatgtatgttgcttaggaaacagcgtgcctggctgtttaatttatcatacctgttttggatggcggacagccttgccgagttttcttcatccgttccgggcttaactgcagtctgatacaggtcaactatttcgtcgcttgtgcgtgacgggaacagttcgtgcggtgaagtcgaatcaaagatacacacgtccaaatcacgtattattaccatatccaaactatcggggtcaaagctgcagtgatatacttctgttttatagccgttatttttggcaaggttagcaatttttttcattattgtggattttcctgttccgggacgtcctttaataaaataccgttttgagaggtcagaggtcaaattctcgatataatttactgacccgtttggggttaaggcgccgaagaaacggtctattattttgccgttgtcatttgatttttcgctgtcaactattttattgcataactcaattgcagcactgtctaaactgttataatctatattgtcaagatatattttctcccaatcgtcgtggactgttttggcttttgaaagatttgaatatattccattatataattttgaaatttgctgtttaatatccagtatttcggacttatgctgtttaagtttgtttctgtcccatgcttttccgagatttatgtattcttcaactgctcccggagctttgggttcaataacgtgaggtgaggttccgtcaaccacagctgttttccggttgttgataatgataccgtccagagaatttgaatcagaactgcaatatatatggtcgatattttctccctggcttagaaaatagtctccgatttttttcatcattgtggattttcctgttccgggccctccttttaaaatataaatgttttcaagtccgtcaaggttttgttcaaagaaacttacaaaacctactgatgagttagcgcatgtaaagtatttataaattcttttggtcatattatcactctccattattaatttactatattaacaactatacattatatgtcaagaataattgtttgatgttataaactaactatattctacaaaatttattaaaatgagatttatttaggtatttatttatgcaggattatcttttcaattaagacgtgcctgggctttcaatgatgtaaatattatataaaaaagtggttttgcaagcatcggagggcagatgaaatctgccgcgtaaggcgcgcagccacggctaagcttattagtaaaaaggataatgacaaacttttttaagtatgttcacactccgcgtgatatggcagctcacctaacgtggtgtgcaagcacacccttccgatgttcaccaagaaacgctattttttggaaaattgattctaaaaaatatttataaaaaagtggctttgcaagcatcggagggcagatgaaatctgccgcgtaaggcgcgcagtcacggaaaatttattagtaaaaaggattatgacaaacttttttaagtatgttcacgctccgcgtgatatggctgctcacctaacgaggcgtgttaaacacgccctcccgatgttcactaagaaacgctattttttggaaaattaattttaaaaaaataattataaaaaagcagttttacaagcatcggaggtgtaacatcacttttcttaaaagtggggtcacactttcagaggtttgctatatgtgattttaatatttatgttcagtttatttaaacctatcaaatttttattcactgcatagaagatatacatataaaaatttcatatataaaattaagtgctatttttaagatagcggattgttaatatatttgttataaagctaatgtatatttattgcaaaagtcaatggtttttcaccttcaagagtaaatttaaatttactcttgaaaaatatgtatgtttatattataattaaatagtataatgtgaaaatagcggatttgtgcaaaaccgttgaatttggtttttaacatttttgtttaatatgatagagagaggttgatttaggtgcaaaatcaggaaaaaacaatggaaaaaatagtagcgctctgtaaaggaagaggatttgtttatcccggttctgagatttatgggggattagccaattcctgggattatggtccgctcggagttgaatttaaaaacaacgttaagagagcgtggtggaaaaagtttattcaggagagcccttataatgttggacttgacgcggctatacttatgaacccgaaagtttgggtggcttcaggtcatgtgggcggattctctgaccctctcatggactgcaaggattgtaaggcaaggttcagagctgataaactgatagaggacgcaaccggagagatagccgacggttggtctgatgaaaagatgatagagtttataaatgaaaaaaatatcccttgtcccgagtgcggaaagcataattttactgatatcagaaagtttaatcttatgtttaaaactttccagggtgtaacagaggatagttccagtgaaatatatctaagaccggagacggctcagggtatttttgtgaactttaagagcgttcagagaacatcccgcaagaagctgccgtttggtataggacaaatcggcaaatcattcagaaacgagattacacccggaaattttattttcagaatcagagaatttgaacagatggaattagaatttttctgtaaaccgggcaccgatttggaatggtttaaatattggaaagactactgtgaaaacttccttttatcattagggattaaaaaggaaaatatgcgtttaagagaccatgaccccgaggagctgtcacattattcaaacgcgactactgatatagaatatcttttcccgtttggttggggagagctttggggaatcgctgacagaaccgattttgacctaaagcagcacagcgagttcagcggtgagaaaatggagtatactgaccctgaaagcggcgagaagtatatcccttactgtattgaaccgtctcttggagcggatagagtagctttggcgtttttagttgacgcttatgacgaagaggttgtcgatcctgaaaagaatgacacgagagttgttatgcacttccacccggcgctcgcgccgataaaggcagcagtgcttccgctttcgaaaaagctttccgaggaagctgtaaaagtctatgagaagctggcgtctgagtttatgtgcgaatatgatgaatcaggctcaataggaaagagataccgccgtcaggatgaaatcggcacgcctttctgtataacctatgacttcgattcaagagatgatgacagtgtgacggttcgccatcgtgattcaatggaacaggaaagagttaaaatagaagatttgacggattatatcagagagagaattgcattttaataaatcatagattgggtgcttataaatgctttttaaaaaaagtttgcaggatgagcttttaaggtttataaaaaaagacagggttcgggcgcatatgccgggtcataacggcggagcagggttgagctccggctttaagcgcaatgcgtttaaacttgatgttacggagtttgatgaaacggataatctgcaaaatccaaacggtataattttaaaaagcgaggagcgtgctgccaaagcttttggagccaaaaaaagtttctttttggtaaacggttcaacagtgggaattgaagccgctatattgacagcggtaagaaacggggacaagctgatagtggacagaacttgtcacaaggcggttatttcaggaatgatacttgccggtgcagaacctatttttattgaacccgagtatattgaaaggtttggaatatatggagctatgtctccaatcacggttatggacgcgctcagaaataatcccgacgctgtaggcgtagttttgacatctccgaattattacggcatttgttctgatattaaacgtttggcaaaaaacatacattcctcaggcaaatttttgattgttgacgaagctcatggcgcacattttgcttttagtgacgagctgccaaaaccggctcttgaatcgggagctgatttggttattcacagcgcccacaagactttgccggcgcttggacagaccgcgctccttcatgtgggaaacacggagttagtagatgttttaaggctgagaagaaatatcaatttgctgcaaacttcaagcccgtcgtatattttgcttgccagtattgatgaagctgtttcaaaaatgtcaaatgaatatggaaagcagctgaatcgggtaatagagacagtaacagcaataaaatctaaaattggagttttggataaggtttcgtgcatgacgagaggtaacttagataatgattatgatataactaagctggcagttgacttttcaaaactgggaataaccggatacggcgctgctgaactgctgaaaaaggattatggaatctatcctgaaatggccgatgagagaaatgttcttttatatataacggcgagcacaacgaaaaaggatttggagcttattgacagggcaataaccgatatatctaagtctgagtataggcctcaggtgattaaaaaaccgaggcctatgccgcatacgagatttgaaatgcctatgaaagaagcttttttctcggacagcgttatgatttcggccgaatcggctattggaaagatttgtgcagaaattgttaattcctgtcctccatgctgccccatagttttgccgggtcaaataattgacaacagcgttgtggaatatctcaaggaatatacggatattgaaaaaatagccgttgtgtcaaacagtataaactccaaaacaggtcaaattgaggaggaaggttaatttcgtgagccattttagcggaatatacggacatgaaagtgtaaaaaagcttctggaaacggctgttaagacaggacgaataagtcacgcatatattttttgcggccctttaggggtcggcagatataccactgcaagggcgtttgctgcagatgcggttaagactgacctgaaacagcatcctgatattataacggttacaaacagtctttatggagttgagagtaaatccgattctatattagtggatactgtgagcgaaatgaggaaagatatatttataaagccatacagtgctgagcgtaagatttatatagttccaaaagcggacactatgaacgcagcgtcccaaaataagcttttgaaagtgtttgaggaaccgcccggatattgcactataattatgatagcggaaaatttaaataaatttttgccgactattttatcaagggcgtcggttgtaaaattttcagcattgccaaacaagactgtatctgactttttgattgacaaatataaactttctgatgaagaagcggccgcaaaagctgttatgagcaatggcagtataggaagggcggctgagttgattgacagccctcgtccggcaatgcttagaaaagagacgatagatggctttatgggacttttgggcagtgagaacagaaatatttataatttcgcaaaatttttaaagtctgaaaaagatgatttaagttttatattttcagttttaaagagcttttttgaagattttgttcatttaaagtttgggcttgcggatgaaatggtaaatgttgataaaaccgcggagatgcgtaaactggctaatgttgctaccaaacgtgccgcggtacagtttttggatataaccttaaaatacgaaagaattgctgcggctaatacaaatcttaggatttcaatgttttgtttagcctgtgaatattgggaggaaatacatggcagagattataggagtacgatttaacagtgcaggaaaggcgtattattttgacccggacgggcaaaacctttctatgggcacaatggtagtcgtagagacctctcatggtgtagagatgggaaaggtttctatcccaaaccgtgaggttagtgaaaaagatttaaaagcgcctctaaaaaaaataataagagttgcgaccgatgatgatataaagcagctgaatgaaaatcaagttaaagaaaaagaagcgtttaaaacggcgagtgaacttattattaagcataaactagagatgaagcttatagatgtcgaatatacgtttgacagaagcaaaattctgttttactttaccgctgacggaagagttgactttagagaccttgttaagtcattggcgagtgtgttcagaacaaggatagaactgcgccaaatcggagttcgtgatgaggcgagacagctcggaagcattggaatatgcggcagatttttgtgctgcagtacttttcttgacgactttcgtccggtttcaataaagatggctaaagaacaagggctatcgcttaatcctacaaagatttcaggagtgtgcggcagacttatgtgctgcctgcagtatgaagaggcggcttatgatgacgcgctgaaaactatgcctgaaagaggggcaactgttgaaactttggacggtaccggaaccgtggtggacacagcaacgcttaagcagcagataagagtaaagttagacggaaccgaaggtcataaaaccgaggtatacaatgttggagaattcaatattgtaggacatgagccttctgtgtcactggacgaattgaagtctaaaaaagagcaggaagttttagaaaaagctcaaagactgcttgaggacagcgagagaataaactcaatttttgcaaatgaagatactgagtttgagaaggaaacagagcgtgagaacaaagaaaatcagaacaaaaacaaaaataacagaagaagacggcgccctgcaggaaagaaaccggcacccaaaaactcaggaaactcagattctaaaaaaccggcagttaaaaattcaggaaacacagaatctaagaatccctctttgaaaaattcggagtctgataataaagagggaaacaacaaaaggcggtatcgccgtcccagcccaaaaaagacaggcaacggcggttataataaccaataagtttggagaaaaatatgcgaagattttttactgaacctgataatattgatttagacaacggcactttgactattattgatgacgcggcgcacatttccaaagtcttgagaatggaatgcggagataaaattatagtttttgacggtacaggatatgaatatgaagctatgcttataaaaatagaaaaagagaagagcatagccaatattttgggaaggagcctgtcagaactggaacccgaaataaaagttactctgtttcaagggattccaaaatcggataagctggagataatagttcaaaaagctgtggagcttggtgttcatgatatcgttcctgttaaaacgtcgaggtctgttgcaaagattgctgatgataaaaagggcaggcagaagatagagcgtctcaataaaatatccaaagaagcggctaagcagtgcggaagagggcttgtaccaaaagtttcaatgcctgttgtcttcagtgctatggctgatattttgaaaaattatgacctttcaataatgttttatgaggagctgggtcatgatggaaagaaaaatttaaaagaaattttaagggcaaatcctgaggcggaatctattgcagtattgattggacctgagggtggattttctccgtcagaggctgagactattcaaaacatgaataaaaataccttctgcgcaggactaggaaaaaggatactcaggacagagaccgcaggaagcaccgctctttctgtgattatgtatgaaaaagatgaaatatgagatataatgctgaaaatattcttcagcaaaatgaaggagagaagaaaatggcggcaatgacaaaaaaggaaaaaatggcggcaaaaagcaagaagattcgcgacaaggagcagagaagagaaaagcttacaaactggtatatgataaatctgagctttggtattttggctattatagcggttcttattctaagacagctctatttgatgccttcaatgctatcatatatgcagattgtgacgtgggtaatgaccggtgtgtttgcggctgcggcaatagttgtcttagccctgggactgaccgggaagataaagaataagcaaagggctgtgaattatagtattttcttgggcgtttgcgctttgggttcgctttggctggcactgtataataaaatcagagtagcggctgaaaatgttctgcatttcattactaataatacgaatttaaacatcaactcacattggaatattaatttgttgattataggtattgttgtttaccttatagctgcttttgtttattatgttataaagctgtatagaacaaaatagaagttatacatatataaaaataaccgggaaacagcggaaattattccgctatactccggttatttttatatagtatcgatttattataaactattttttcagcagtgaagccgcccagtccttgtcttctttggttacacggtaagaatctctcagttttctgactgtcatttttaagacagcgtctcccaatgaaaagttgtttgtcagataatcctttgtcaagtccctttgcttggcaaaagcggttgcgataagccacgcctgcgccatttgaacataatattcgtcacttttcacgctgttggcttcgtttagagcgtattcggtgttttctttatcgcagagataataatcaagcaaaattataagcccgactctttgttcccaggggttttcgctctttaaaaatctatatatttcaattttgtattcttcaatatatttttttatttctttaaacgaacttacgggacaatcacagcatgcccagttgtttactttagaggcgtaggttctgattctttgacagagttccccgaacggaagtttggcgtatccgattaccattccgtatatagaaatttcttcatgagataaggatttattatcaagaatgtccacataatccaaaaaagcgcgaaaagacccttttgcaatcaatttggcagtatcgcgcattttgggaacccttactccgtaaatttgactttcgtatgatataggtgttattttgctgttaaattctttatatttgtcgtcagcaagactttttaggtattcaatataggcttggtagctgttatcattccatattgtttgtgtaaaatccatattattccgccttttaatatatttaatcctcaaaatcaccggttaggacgttaataatccgacagtgccctgaatctaaagcataattggtagtgtaagccgttccgctggacatagagagaatatacacaataaccgccgaactgttgtctaccataaatctgttacgcttgtgcatacattcgggcgtatagctttccgatacatatatgacttcatcggcgcttccgagaagctttgtatattgatttttttgtatcttgttccatttgcaagcctggtctttgcacggaagagcaagtataagcctgatatttgaatatttagagcgaagtttaataacactttccgccgccagcgtatcaaagccaagagcgcctcctgagatataatttgttattcccttattatagagcgtttcaagtattttatccaaattagcaagaatgttgtcatagtcctgagacttaacaatcctgtgtccgctgaagcagcaagtatttttttgatttatattattttccgctgtaaatttcaaatttcatcaccttttatagtatatcattgattaagtgttaacacaagtctttactttttgctttttttgatttataatatttcgctagaggctggtgaattatgagaattttaaaacaaattggatttatatttggtatttgtttggtgggtcagataatagcggagctaataccggtgccgtttcccggaagcgtaatgagtatggtgctgttatttatattgtttatgcttaactgggcaaatcctgaaaagctgaaaaatgttaatgattttttgctggaaaatatgtcgttttttttcgttccgtcagcggttagcataataacaaaatatgatttaataaaaaacagtattgttcagattttgattatctgtgttgtttcgtttgtggtgacatttgctgtaacggcttatacagtcacttttgttatgaaaatacaagagcgtttcagaagaaaaagaattggttcgggagatgaatgctgatgcaggacataattaataacataacatccagcgccctgttcggggttacactgagtatatttgcatatgttttcggggtaatggctaataaaaaacttaagacgcctatagccaatcctgttcttattgctgatataattattgtaactattttattggcgcttaatattccatacgaaaattatgctgtcggcggaagttttatagagctgtttctggctccagtaacagcggctttggcggttaagatacacgctcagattaaagagctgaaagcgaattggctgccgctgattatcggaacggctgtcgggtcgctggcttctatattatgtgttctgtttatgtgccgtttatttgggtttagtgatacgctgacagtatctttatttccaaaatcagttacaacagctatagcgataccgattagtgaaagtcacggcggcgtttcagcgataacggttatctcgctgatgtttaccggtatgctcggtgccatgttttcaccagttttgataaaattattccgtataaaaaatccggtcgcagcaggcaccgctataggaacatcgtcacatgcactcggcacaacaaaggccttagaactgggagatgtagagggggcaatgagcggtattgccataggaatggcaggtttaataactactgtctattctatttttatgctgtaagggtttaaaaataaaagtaaatataaataacgattcatataattatacaggttaaaaattattttatagggtggagaagatgaaaacaaatagagtttattcaaataagtattgggaagtaaaaccttttccggagagtgtggaggagggaagaacctggcgtgaaggaatggtaggaggcaacggagaaaatggttttataaccagcggcgcgccttattcggatacgattatttatcagaatattaatttcataatgcctagtgatgaaccgagatatacgccggaggagcttttaagcgaacttgaggaggcaaggcaggctgtaataaattttgatgatacgtgggacgtgcatggaaggaagagaacatgtttttattgttttcatccgggtcatttactgagaatgaatatgaatgaccggaactgtgaaagttatgtgcgctggactgattatgaaacgggcgaagtgtgcgttagttttgaggatgaggacggaatatgggaaagaagaacgtttacctcgcatactgacaatgtaactattacagaaataaaaaaatcatctaaagattcaaaaatagatatggttataagtattgatgatgtctcatcgatgaaaaagttcgggcttcgtgatgaaaattttatgcagtataagaagcttgttgatgaagacggctcatatatagcccaagccgctcattatccgtcatacgaaggttccgagctgaaaaacggcggttatgccggggtcacctatgttttgaatattggtggaactaaagaaaagatactgcttgaaaacacagatgaaaaacaaaatgttggagaggaacaaaatccggctgtaaaaatctgcggtgctgaggctgtttatttgataaccaaaaccggcaggacttttgatatgggagaatttcaagagtttaagaatagtaaaagttataaacttgttgattctttgcttaatgattgtattgctgccgctgaaaactatggaggcagtaagttcagctatgatgacgctttgaaaaagagtgccgagatacaaaaggagatgtttggggcagtatatttttcgttggggaacgatgagaatatttcaaatgaagacttgattgaaagacagaaaagcagtgaagttctcagcagttcttttgtagaaaaggcatataaccatggaagatatgcaatgacctgctgcgccggaaaaactatgagtcgtttgtgcggtatgtggagcggcgaatggaacacaaaatggcgcgggatatatacaatggacgccaatgttaacattcagtccagcggtatgaatacaggaaatttaaaagaattcggaataggatatgttaattttgttctgaggcaaatcgaggactggaaagataacgcgaaaaaatcttacggtatggaagacgctattcaggttcctgtaaactgtgacggcgacagggcaatgatggtggaatacgacagcaactacccgtttcagtattggaacgcaggagcgtcttggatgatacagcctatctttgagatgtatcagtgctttggaaatattactgtaaatactgattttggagataaagaattgctcggcgatatattattgcctttgcttagaatgcagaccaacttttggaaacagttgtgcactcccgagtattttactgatacggatggcaatgcgtgttatttaaaaggtaaaaaaagcttaaatgacggtgaaaaatatctgataataccatcgtattctccggaaaatcatcctaaaggatatgaatctactataaccgccaatgctgcaatggatatttctgctgcacgcgacggtctcagaatgaatattgaggttgaaagaatattaaaatttgaaggatatgaggacagaatatcagaaattcagaattttgaaaagctattgcctgattataaattcgacgatagcggagcgctttgtgagtggtcaatgaaaggttatgaggaaaataatgttcataggcacataagccatctttactgtgcttggccggcatatgaaactcagcacagcaaagtgctcacagacgcatgtaatcaggccatagagaacagaaacactgaaaataaaggccatgacgacacggcttcacatggatgggtacataaggctttagtggcggcaagactgaaaaatccgaaatctgtgtatgaaaccctatatatattattaaacagtgaaatttattacacttcactgatgactgaccataatactgacagacgtgcagatacttattgtacagataccgggtttggtattgttggtattattaacgaggctttgctctattcaaatacaggagaaatagaacttttgcctgcgctgcctgtgcagtggaaatgcggagaaataagaggtcttatggcaagaaccgaagcggaagtctccattaaatggtttaatggaaaagcggaagctaaaatcaagtcttttaagcctcagacaataacagtatcatgcggagagagtaaaaaaacagttgattttaaagcgggagaagagaaagaattggagtttattctttaatgctattctgttataacagtcttatttcagttagtgcaatacaaataatttgagtcttaaaatgtttttatgataaaataaaaatctaagcctttccgatataattgggcgggcttagatttaatttttgttctttaagttatagctttgtttataattttataaattatagtttgtttatatatatttgtgcagggttttaaacatatcatccacattgataggtttggatatatgggcgttcatacctgaagaaagagccttggttatatcactttcaaagctatgggcggttatagctattattggtatggttacggcgtcaggtttttctgagttccgtatttgtgccgtcgcttcatatccgtcaagatttggcatctgcacgtccattagtatcaaatcaaaataattatcagccgaattattatactttttaacagcgtctaaaccgtcaaccgcaagttcaacgtttgcattttgtgattttaaaagctcggaaataatttcgcggttgagagcattatcctcagttactaagatgttttttccggctatacttttttctgaattttcagagtgatcgtttttacttaatttggtttgattatttttatatttaaatggaagctcaaccgtcacggatgttcctgaaccagatttgcttttaatatttatgcttccttttaaaagcgtaaccaaattttttacaattgacattccaagaccggtgcctccgtactcgcgggaaattctttcatcctgctgctcaaacggtgtaaaaatcctgtctttaaattcgtcagtcatacctattccgttatcggttattataaatgatatgtataaaatattatccacttcagagcggcgcaggatatcaaactctatttttccgtttttgccggtaaatttgactgcgtttgataatatattcagcattatttgtttgaaacggagagaatctccaatcagggcaagacctgaaaggcgtttatcaaaagatatttttaagtcaatattcttttcttctgtctgagcgttaattgcggcaagaagttcgtctacagcgtctttcaaaacaaatttttctgttttcgtctgcaattttccgctgtcgattttcgaaagatcaagtatatcgtttataagagaaagcagatgcttggaagcatactctgttttttggagataattgtttagttttactttatcatcgatattttgcttagacagattagtgaatccgattattgcattgagaggagttcttatctcatgtgaaatatttcttaaaaatttatctctagtttttgcagaattttcagctactatcagcgcgtcacgcaagccgttttcgtattctatttgtcgtttttttgtttcgtcgatatttcggtttgcaataagaatacatttgcagcctgattttgctttattatcatcgtgaatactttccacaaaatacatataccaagagtatttgccgtcctgtttgcaggtgcgcgcttcaaaactaaaactttcgccgcaaaatagttttgacatatttacatcagaaaagtattccaaaaaattttttctatcgtttggatgtatattgtttagacatatatactctatatatttttttaaaccaaattcaaaattgcatgaattagagacgccgtttctgttgatgacttccacgtttgacgaggtgttattataagtaacccgccacacttggtcatacatgctcatcaatactttgccgagtataacatcgtttgcagttcttttagctttaattttattctttactattataaaaaagcatataaaaaatataatgagaaacagaataattatgctaagcagcagcgtcatcatatcgggataactatggaacaatgttttcaggttgtaactgtcatcataaatattgttgtttttgactataatgttgtcgatttgaccgttggttattgaaagcagcgatttatcaattattctcagcagtgttgggtctgccgtatcggatacgcctatagatatatcttgtatagagcccgtaaggtcgttgcttactaaatcggaatatttaaattttgataaaagataattcgcagtgatactgttcgcgtaagtacaattgacgttgccgttttcgactgcgtcaaaacattcttcaatcgtgtcgtattctattattgcagaggtcgattcatatttctctcgaataaacttatttatgtaaaatccttttggaagcgctatggtgttcttatttgattcttcaatttttttgatttgtattatgttagagtttagataaggatttgataatgatacattgtgttcggacgcccagttatagtcatatgtgattcctgaaattatatccgcttctccttcatttatcattcggcatgcttcctcatatgatggagcgtcaattattgtaaatttcagaccggaatattttgatataagctgtaaaacatcggctgatattcctgaatattttttgttgtttgtatcataatattctattggcgcccaatacgggtcgtaaactactttgaactcaggcgagctgtttataaaatcaatctcctgctgtgtgaaattcggctggaatatttgaccgttattgaaatattttttatgcatctgatagctgaaggcaggtgaaatatttttcatttcaaacaatatattatccagtttattaagatatggactgcctttggttaaggcaaaatatacaggcatttcgggaaaccgggttataactttaagattttttttgctgccggatccaatagtataaataaggtctatttgatttgaaaataatgcgttctgcatttcaaattgggtcttaaagtatataggctgataggtatacccatacttatttatataatcatcaagctgatagttatgacggctgccttccagtatacctattttcaggtcagctgtttcacctaaattgtcaaagttcatatcttctcttgctgagggggcatagagttcatatgcggctgttgacatctcgtatttagaaaaatcatatttataggcgtcttccctatttttgcttataccgcagacaatatctacttgtccattttccagcatatttaaacaatcggcaaaaggggcttttatatattcgaaatcccatccggcatactggccaacctttgagagataatcataaacatatccggaaggatcaccactgtcattaagttcctgataaaaatctatttgatagaaaccaactttgagcgtttgtttttgatgtgaattttcatcactgaaaacagttaaatttataagacaaagagtaaataaaagaaagattgaaacgaaacgtttcattatccaagccccccaggaaaatcaaaaatcaataatagatattatttgatatataaatattatatcacgatatatagatttttgcaataacgtatggaagaaaatggaaatttttattttgtttacggcaataaactacatacacagccagtttagtattaaaacgctcgcaccaactactgccattgatgacgccagccataataaactttgaaccagcactttgtttttaaccttaggtttggtttgtctttttgaagacgaatagacatcaggatacagaaagctgtttattattctctgagcttctgttactatatcggtctcgcggttctttgaaaagtatttctgtacttcggatgtgttttgagaaacattgtctcttagaataaaaattgcctgttcaattttatccgacttgatatcattgattattacaacttggcgtttgttttttaacatcataagtatcaccactcaataaaattttttatatggagattattgccggaaatattaaatatatacatgaatatatttaaatgtaatttgttttgggagaaatttattatgacaaaaaaagtaatttgtatattattagtatatatatttatatttatggtttttccgtgcctaacaagtgacttcaatgaagtatatgtcaatgaaactaaaactgaaggcggcagagctgcggaagctgccgctgtgtatcttgacgtgccgcgcagtgttttggattgttcggcatttactcaaaaagcatattcagatataggtttgtcaataccgagagttacatatgagcaagcggagtgcggcgttaaaatatatgattatgaaaaactggagccgggagacataatttgtatgggcaaaggggcggagcctgataatattacccatgtcggaatttattgcggaaatgatataatgcttcattcttcgtcaagccggggaaaaataattgaagtcagtctatcagaatggatagaaaacggcggatatggcactccgtttcagtatgccgtaagagtttcccggtaattttggtgtgcgaaaatttaaagcccgataagattttattgattgagtctctttaagtattagttagattgattataagcgtatctgttttgctgtaattttttgcctctgagttattatcaaaaaagttttattattacataaattgttttgataagacataataaaaatttgtgaatcgacacttaatataaaattgtaaactaattatttttttattaccgagattgttggtatttttaaatatttatctataatattttatagatatttttaattatataaagtttagaattaactaggataataattgatttaaaaaattttaaggaacaaatttatttttaatgcggaaacaaaacactgaaatattggtttgtaataacttattattgcgattagaagtaaaatctgtagaaaaatttattaaaataagctatgataactaaatgattaaatagctgaggcaggaggatatggttatgaaaattaatagggcgctaaaaagtttcacagcaatggctttatctgctatattggcgtttggggcggcaggaacagcggcggcgtcaacgaatacggataacgcgtcggctgctgaattttctgatactgagcctgaccgtgcaattgcttttcccggcgcggacggagcgggtaagtttgcaaccggagggcgcggcggagagatatatcatgttacaaatttgaatgacagcgggacaggctcgctgcgtgacgcggtttcaaaaggaagacggatagtggtttttgatgtgggcggaacaataaatttgaagtcagatttaagtataagcggaaatataagcgttatgggacagacggctccgggaggagccggagtgactgtgcgcaacggaaagcttgctatggcaggtgataatattattgtcaggtatatgacgtcaagacccggtgaaaaaggaagcggtgagtatgacgcctggggcggatcaaaggggtcaaattcaattattgaccattgttcaataggttgggcaaatgatgagcagtttggactttattcaagcagaaatatgacaatgcagtatagcataataggtcctgcaaattgtctttccacacactctaaaggctctcatggattcggtcctatgtttggtgccgccagtaatacttggcatcacaatttgatttgtcataatatgtccagaaatttcaggggtaaggttgaaagagaacagcctaatgactatgtgaacaatgtggtgtatggctggggcggacaaacagcatacggcacttttggacatttaaactatgtgaacaattattttaaaaagagtatttcttcgagaaacggtgataattttggttctctcgacagtggttccaactatgaaactacaaagttttttatggaaggaaataagatgacggacaggaagggcaacgcggccaatcctatgagcaccaataactggaacggcggccttagtttaaaccgcagtcttaattattacgagtctcattatcgtgcgtcagagcattttcctattatatcaaatggtattgatgtatctgctgcaaaaaatcccgaatcagcagacgccgcttttaataatgttgtcagctatgcaggggcggctgtaaatttagattcaaggaataaaattgacgctgaggtattaaatgacgcttacaccggctcaggttctctgtcaggcggacttgagaactcaaaagtgacagcggatgttagaagcaaatacagtattaagtatgtaaattatgacgaatattacccaaaatcagttctcaaaaaggaaattatagacagtgacaatgacggtatgcctgatgactgggagattgccagaggtctgaatccaaatgacagcagtgatgcaaatggttattatattggcggagcctatactaatattgaacattactgcaatgatttgactgtagattcattccccgagggggtagttactttatcaccgacgctggacgagcttggagctgattattctaaagcaaaagaggacttaaattctcttaagctttctaaaactaaaatttcgtcggctgatgaaattagtttgccggtctcgggttctaagtttggctcaaaaataagctggagttcttcatcggattctttgaaaatagagaataatgctgttactcaggtgattcagccaaccggcgtgagtaatgaaaatgcatacattgccgcggatatagcgaatggtgattgtgtgcttaaaaagtatttcactgttacgatactttcttcaactatgaattggttcgcgtcgagttccgataacggcaaatcggcgggcacggttctggctgatggactgagcaatgtaagtggtattatcacgggagaactcggagcctcggtctccattgacggcgtatcaagaacgacatatataacgtcggatgcaaacggcggttacagcgatggcaaaggcagcggaacatgtcttaaatatacggctcctaatgatggaacgctatatggatatgcggcggaattggcggacacaaagacgctttatattgtacctgaaggagttgaaaattataaaactgactatgttggtatgaaggcaggcaacggaggaaccgttacggtttcagctaaggtaaaagccgggaatacatattatatcttcactgcgggaacaaaaggaaagcttttaggaatgaagtttgccaaaaaaacagagagttcttctgagatatatgaatcaaattatgaaaagtgggacttcgatgagctttcagcaggaacttcatatgctaaaaatgataccatcacaaacaagaatggaaagagtataagccttgatataactgacgcggcggattctattactattgcaaaccgcagcggaagcagtaactatctaaagatcgcggataacagtaaaagcaggttgaagtggtcgtataaaccggattcgccgttaagcggaaataaagtcgtatttgaatttgagtttaataaaagcgatattgaaaaggacacaacgttcctaagagtatatgatgaaattaatgcgaatgcaaataatacttattcaaacggaagtgttatatttgatttaaagaccagcagcaacaagggagagtccagttcaacaagcagcgagcttgttcttaccgattatttttctatgggaacaagcagcacagacgatagtcctaagggagtagattttggtttttcaaatttcacctatcaaaaagataaatggtatggtattagacttgaatatatgaaaaatgctgacggtaaaaacgaggttgcactttatactaaaaacgacggagcttcaaagtatacttaccgtgactccgttatattgggctcaggggttcagagaccgaatgcagatatagacaatttgactctgacgcctaccaaaatggaattaatgactccgggaagcggaactgttacaataggtatagataatatatcgattggaactgaaacacttgctgaagaaccaaaaacagatacctatgttttccgccaaaacggcgttgaagcaaccggctatgacgacagcgaactgacgtgcagtataaacggaatgcctgaaaatgctgaatatactgcggcggcagctgagtatgacggcaatggtatgttgataggtatgacaagaagcgaatgtgtgggagacggcgagataagtataatgccttcagaagcttcacaggaaattaaaatatttgtttggagcgatatggcaagtatggaaccactaatcgaatgtgggaatataaaaagaaaataaaatatttgttatgaatgtgttaatcttataataaattatatatttaatcaaaactactgttcgttgcgtagaaaaagagactgggttttgaacctgcctcaaaatctttagattttttgtctaacttttgggggtcggttcatttgccggtctctttttctgtaattaattattagaaatatggtatttataattacaacttacagcaatgctaaagtgaagtataagttttttagcttaaaagtttgttaattataatgttatgtaattaatcctatgtgtatattaatttatgtatataacaaatatttaacgtataaagtatgaacggttggcggatatatttgaaaagggattaaaatatttgtgtatgattcagtaatatagatgtgaaacaagttagggaaaacttaatattttagaacagagattaaataacacatattaaagcgttaaaatgtataagttatttattaattagaattgaaaacggccgtctagatttgaactgacctcacaatcattagattttgtctaacttttgggggtcacatcaattgacggccgttttcagtttttgcagttaattgtgtttaaagcagtatctgtgttttatagagaaaataattttataatatagttattgttccagcaatattacgtcattttgaggacttaataaatcatcccaaaggtatactttgatattatatttttctgaaaatgcaatctctatattctgagactgagaatcagatgaatatggaatttctataactttaatatcctttaaaatcgtgtttgtctcatcgtatactgcaacagcaaataatgcgtttttatttttagtattaacaatttcagcagttacttttccgttttcaagctttggatattctttgtaatatattccgggaatattcggcgttgcggtcggcgggtttgcactcggtgttgcagacggttctgtggtaggcgaagcagttggcggtgctgttggttcagcggtcggcgcaggcgtgctggtaggttcgccgattttgctgaattgagcgcttataactacatttttggccggcatagtaaaagtatagttgttttcgtcagttttttctactacacttccgctgtctacattgacggaattaacaaagtatccgtcttcgggggatgcgattatttttacggtttcaccttctttggctgttggaactttgtctgaaaaagtaacactctttaatcctattttcgatccattagcccaagcataatatcttgaatccgcttcaacaggtataacatacgtgttgagttcggctgatgacggcacatatgatttaataaaatagctttcggttgcatcatcataaaggttaaatggtttgccgggatttagaaataattcaagagtcaagtatcccggtctgtttggaataaagctaaagacgtttccggtaggttcatataagctgagtggaaataggacattggggttattaagtccttttaggacttttgttctgcttccgtttacatcaacataattccattgcacagcgtcccagaatgtaaaagttccgtcgctgctgtcttttccatttatattcagaactgcctttccgttgccgaatatattggttacaccttcaacggcgtctgccggaatattgtcgtcggcaagccaggttattttattgccgccgcttccgataccgctttccgtctcaatttgtatggttccgttttgaatattttcatcaatggcaatttcgtattttgggattgggggttctgttggttcaggggtagcggttggctgcggcgttggcgttgcattttcatctgtcagtttaagattgctgaattttgcttccgccatatactctttcctaggtgtgccctgtattgagtcgaccgccagtcctacgtacagagtttctgctaatcctgatattgttatagtttgaggctgtctcggattatctctccagttagtgccgctgtctgaaactgacagagtaataacgtcgccttttctttgcattctgaggtatttaggaacgcggtattcagatttgctggtgtcatatgagtcgctgttggatatttcttttccgctgctgtttctaaaccatgaaacttttgctgaggagccctgtgaggtcctatatatagcctttacattttcaccgtatttaagccagccgtcagaaagcatagccattctcgaattgccgttaaggttttccctaagcatgattccgcagagctcgccgttttcaaatttcggaacctgttcggttttgacagaaatatcaaaatcgcccttgatttcctgatacataaaatcgcaggtatccgaaccttttccggctccgattgctccgcttcccattatggtatatactccgttgtccaggctggatccgccttttccgttaaaggctgtagtgccgatttgagcatgactgaaactgcccggatcagaacatgattttgcatacacaatagatgtggggctttgagttgattcgcctttgttgttataagctcttgaagaaatataatgagtgcccggagttaatgttatatctgtgttaacagcagaatcgtttactgtttttaccagtttagaaccgtcatatatttctattttggttatatatgtgtcatctgatgaaggtgacgcttcagcacagtaattcaggtcgaagtctacagtcagaacctcccagtttccgttgtttatctgtttcccgtctatagtatccgaaatagactgtatcgccggattggtaacaactatagaagggtttgtgggtgctgactgttttaaagtccagtcgtttacataggcttctatccaagtatatccggcatattgaccgctttttactatctctgtttcagaagctgtgcccattccgttttcggatttccaatcgtcagggatggagaacacgcgttttgttgcaggcatttcaactaaacccgcaacttcattcgcattgtttattattctgccggtttggtttttaacgtcagctattattctcgcgtctatgctgtccctcttaggaagggttgcgcctgcgtctgataataccgtgttataagcttcttcggcgctttgggtttcggaaagttcatactctcccatatctattggggcggaaagcttgtttgcggccgacgagttgtttacgccgttccagttatttgccgtaacattggcatccccatacatatagtttccgtcaaaataaaaattggatttagagacatcaggataagcgtttgatatatcaaatattctgctttttatttttgacgcggtacccgggccgaatttataataattgtttatccaattcacgtttgaaggagtttgagtaacgttattgtatgaatacggttcggcgccgtatgcggagtttgtttgaccccaattatatattacgttattgcgaacatctgtgttttgcagctcacggtcaagacgcgggcttcggctgtcatgatgagcaagcaggttatgatgccatgttgagtttgttcctccgaaaatagctccgtatccgtgcgcgcctttaaagtggtttgacattcttaggctttctgtagccaggcagttttgtactgtcatatttgaactcggagtaccgctttcggttgagcctgcgtacagcgtcaaaagttcgtcaacgccccagcttgtactgcagtggtccaggataatgtttttgttccagcgtccgccgattccgtcaggttcaccgccgtttatatcggttggtctgactctcaaatatctcataataatattcctgacgccgtttgctatagaaatatcaccgccgagaagagttattccatctccgggggcggtctgaccgagtatggttaaattactgttttttattgtaaaagttccgtttaagcgaatggttccgccaacatcaaaaacaatgattctgccaggtcttgaaaccgcgtcagcgaatgaaccggcgccctttgtgttaaggtttgtgacatggtatactgtaggcgacgaagcgccgcgtgctccaagtgtatatttaccgccgccttcagctcccggaaatgccggaatattgtctgccccaaagaccgtatgaacgggcagtgctaaagtgagcagcgcaagcagaaccgcaaatgcggaacaaaatttttttagacagtttttttctccccttaaaatcataagtttaccccctaatttgtctgttaacttcattaagtaaaaaacaaattaattataacatatttattataaaaaaggtaatgaaaacttagctctaataacaggaattttgcctttgaatgtgaaaaaaattaacatttttagaaaaatccaatatttatccatatggagttgtaacagttcatgaagacatagaattcttgagacggttaaattataattaaagtaatatgctgatattggtttcagttttatactatctccatttgctgttacatagatagattattagtctaaatttcagtattttaatgttattcttgacgttaactttttctgctttttgttatactgtgtcttgaagcggtacttaatatataaatttaaatatctatttaattaatttgtatctgcaatttgataaatttattttcatattctttaatataattttattctcaaggcataaaaaaacatatttttgagaatttattttattcttcccggggaagacagttttttataagtctgtttttacttgaattgtgcaaaagattgacagttgattttatatttagcattctgccgggacctgttgttattaaaaatacatggcaaaacttaatttaaacttgtatatttgattatgactatataaaagattgacatacataagactaaattataaaatatattgtaagttcttatttatgattatatattagtataaacaagtgttttatttataagacgaacaaattatataagataaacaaattagataggatgaaaaacttatgaataatgaaattaaaatacgtgcggcaaaagcggaggacgctaaagcgcttctaaatatatatgagccttatgttaggaacacagctgtaacatttgaatatgaagtgccttctttacaaacttttgctgaaaggatttgtaatgtgctggacaagtatccatatctcctggctgaaaaaaacggcgaggttttgggttacgcttatgcggattcctttcacgagcgggcggcttataaatgggcggcggaaacttctgtatacataaagatgaataagaggaggtcggggattgggaagattctatataatgagctggaaaacattttgaaaacgcagggaattttgaatcttaatgcctgtattgcctgtctaagtaaaaaagatgagcatatatccgacgatagtttggtttttcataaaaagtgcggttataagtatgttgggaagtttcataaatgcggatataaatttaacaagtggtatgatatggtatggatggaaaaacacataggctctcatacaagtaatcaaccggagataaaaaaattcagtgagataaaaattgatataggctgatataaaacgcggcgctgaaaactgcgctttttaatctataaaattaataattccgcaagatataattttatgttttttattttaaaaatatttataaatcagtattgacattgaaaaaattgtatggtaaaatatatgtctgtatatagtgaggaagtttgcttattttgaggttataactgagactgagaaagagttgttgtgtgttagaatcaacgttttttcgagggatttcgcagtcttggattattagattttactatgatttttaagccccggttgttaagcgatttttttattgtattcggatgcccgaaatatatattttgtggttttataaaattttatacgagaggtgatcggttttatggtacatcctgtgaaactaggcgaaaacacacgtatgagttacggtaaaatcaatgaggttttggaaatgccgaacttgattgagatacaaaccaattcatacaaatggtttttgagtgaaggactgaaggaggtctttcatgacgtttctcccataacggattataccggaaatcttattttggagtttattgactatagattagagtcaaagccgaaatatgatattgaggaatgtaaagaaagagatgcaacatacgcagcacctctcagggtaaaagttcgtctgataaacaaagagtcgggcgaggttaaagaacaggagatatttatgggcgattttccgcttatgactccgtcgggtacgtttattataaacggagctgagcgtgttatcgtgtctcagcttgttcgtgcgcccagcgtatattatgctcaggattatgataagctgggcaaaaagctgtttacgtctcaggttataccaaaccgcggcgcgtggcttgagtatgagactgacagcaatgatatttattatgtaagaatcgacagaaccagaaaaattcctgtgaccgtgttaatacgtgctttgggatttggtactgacgctgaaattatagatttgttcggtgaggatgaacgccttatcgcaacaatggagaaagatacaaccaagacccacgaagagggtctgcttgaagtgtacagaagactgcgtccgggcgagccgcctactgttgacagtgctcagtctttgatttccagcaccttctttgatccgaaaagatacgatatggctaaagtcggcagatataagtacaacaaaaagctgatgttaagcgatagggttacgggtcatgtatcggctgagaatattatcagccctgttaccggtgaaattctgtgtgaggccggtcagacaattacaaaagaaattgctcacagtcttgaggtaaatgctgttaacgaggtcgttttagactgtgacggcaaacagacgaaggttatttcaaacaatatggttgatatgcctgagtatattttgaataaaataggcgaagagctcagctatagtccgcgcgagtgcggaattaccgagcgtgtcagacgcagcgtgcttgatgaaattttagaccagttcggagatccgaattctgacgagtttaaaacagctgttgaggacagacgcgacgatcttcagcctaagcatgtgcttattgatgatattatagcgtctatgtcatatatcggcaatcttgcaaacggagtaggcgaagttgacgatatcgaccatttgggcaacagaagaataagaagcgttggagaactgcttcaaaaccagtttagaataggtctttcaagaatggaacgtgtggttcgtgaaagaatgaccacatctgaccttgattctattactccgcagtctttgattaatataagaccggtaacttccgcaataaaagagttctttggttcttctcagctttcacagtttatggatcagattaaccctctcggcgagctgactcataaaagaagactgtcagcgctgggacccggcggtctgtcaagagaacgtgccggatacgaagtgcgtgacgttcaccattctcattacggccgtatgtgtcctattgagacccctgaaggtcctaatatcggacttatcaactcgctaagcggatttgccagagttaacgagtatggttttatcgaaactccatacagaagagttgaccatgagaaaatgattgtcactgatgaagtgacttatatgacagccgattatgaagaaggtttttatgttgctcaggcaaacgagcctttgaatgatgacggttcatttgtgaacaagaagattgtcactagatataaagatgaatttatagaagttccgcctgaaagggtggactatatggacgtatctccgagacaggttacatctatagctacagccatgattccgttccttgagaacgacgacgctaaccgtgccctgatgggttcaaacatgcagcgtcaggcggttccgcttttggttcctgagtctcctatcattggtacgggtatggaatataaagccgctaaggattcaggcgtttgtgttcttgccaaaagagacggaacagtttcccgtgtatctgccacaagaatagaagttaagacagacgacggcgatacggacacatataagcttataaaatttaagcgttccaaccagggaatgtgtataaaccaaaaacctatagttgaaaagggtcaaaaggtaaaggaaggtcagataatagctgacggtccgtctactagaaacggcgagataggtcttggaagaaatattcgaatggcgtttatgacatgggaaggttacaattacgaggacgctattctaatcagcgaggaactagttaaagaagacgtattcacttctattcatattgaggaatatgaggtagacgccagagatacaaaattaggacctgaagagataacaagagatataccgaatattggcgaggaagcgcttaaagaccttgacgagagaggtataatacgcgtcggagccgaggtagagagcggagatattttggttggaaaggttactcctaagggagaaaccgaactcactgccgaagagagacttctgcgtgctattttcggagaaaaagcccgtgaggtaagagatacttcattgagagtgccccacggagaatatggaattatagttgatgtaaaagtgtttacaagagctaacggcgatgaattgccgccgggagttaatcaggtagtccgctgctatatagcacagaagagaaagatttctgtcggtgataaaatggcaggacgtcatggtaataagggtgttgtatcacgtattctgccggttgaagatatgccgttccttcctgacggaacaccgcttcagatagttctgaaccctctaggcgtaccttcgcgtatgaacattggacaggttcttgaggttcatttgggttatgccgctaaggctctgggctggaaggttgccaccccggtatttgacggtgcaacagaggaagatataatggaagccttaaaagaggccggatacaacgaagacggaaagagcgtcctctatgacggaagaacaggagaaccgtttgataacagggtaacggtaggttacatgcacatgctgaaactcgcccatcttgttgatgataaaatccatgcccgttcaaccggaccttactcgcttgtcactcagcagccgctgggaggtaaagcgcagttcggcggacagcgtttcggagaaatggaagtttgggctcttgaagcttacggcgcggcttatacgcttcaggagatactgacggttaagtcggatgatgttgtcggacgtgttaagacttacgaagcaatagttaagggtgaaaatgttcctgagccgggagttcctgagtcgtttaaggtattaataaaagaattgcagagcttggctcttgatattaaagtccttgacggagacggaaatgaggttatacttcgtgaaactctcgatgatgacgaggttgaggaattgcctgttaacattgccggatttgaggacgatgaactcgttcaggctaaggcggctgaaccggaagatgaacttttggcagaagaagaggctgatgaagaagagaccgaaagcgatataattgacgaggtaactcagattttggcggctcctttgattcaggaaggcgacgctgacgtttcagcttttgaggacgacgaggatgttaagtcatttgaagaattgagagatgcagaagattttgatgatgaagacgacgataattactaattaagaacagtcagcataaactgttcagccgttatcggtttatgtttttcaattgatattgtttgcttaactcacggcagacaaagggttatacagtgagtagaaaggcatggtcgtttatgggagaatatcaaaattttgaagcaatcaaaatcggacttgcttcacctgaaaaaatcagggaatggtccagaggtgaagtaaagaagccggaaactataaactacagaacactgaaacctgaaaaagacggtttgttctgtgaaagaatattcggaccgcagaaggactgggagtgtcactgcggtaagtacaagagagttcgttataagggcgttgtttgtgaccgatgcggagttgaggttacaagaagcaaggtaaggcgtgagcgtatgggacatattgagctggctgtcccggtttcacatatttggtattttaaaggaataccgtcccgtatgggattaatgcttgatatttctccgcgcgcgcttgagaaagtgctgtattttgccgcttatatagttattgacccgggcaataccggacttatgaaaaatcaaatactgactgagaaggaatatacagaaaaccgtgagaaatacggcgatatgttccgtgccggaatgggagctgaatcaatacttgaaatgctccgtgaaattgatcttgaggaactatatcaggaactcaagaatgatttggaaggcgcaaaaggtcagaaaaaaatcagaactgtaagacgtcttgaggtcgttgaagctttcagacagtcaggaaataagcctgagtggatgattttatcggttattcctgttataccgcccgaaatcagaccaatggttcagctggacggcggaagatttgcaaccagtgacttgaatgacctttaccgacgcgttataaacagaaataacagactgaaacgtctgcttgatttgggcgctcctgatattattgtcagaaacgagaagagaatgcttcaggaggcggttgacgcattaattgataacggaagacgcggcagacctgttaccggacccggaaacagaccgctcaagtctttgtcagatatgcttaaaggtaagcagggacgtttccgtcagaaccttttgggaaaacgtgttgactattcaggccgttcagttatcgttgtaggaccggagctaaagatttatcagtgcggacttcctaaaaagatggctttggaattgtttaagccatttgttatgaagaagctggtagaagacggacttgctcataatataaaatctgcaaagagaatggtagagcgcgtccgtgaagaagtttgggatgtgcttgaggatgtaatcgcagaccatccggttcttctgaaccgtgcgccaacgcttcataggctgggtattgaagcctttgagcctgttttggttgaaggtaaggctctgaagcttcaccctcttgtttgtactgcgtttaacgctgactttgacggtgaccaaatggctgttcaccttccgctttcagcagaagctcaggctgaggcaagatacttgatgctgtcagcgaacaacctgataaagcctcaggatggtaagccggttacggttccgactcaggatatggttttgggttcgtattaccttactcttaaagatgatactgagctgggttctccgagagaagaggacggtcatactgtatatagggtatacagttctcctacggaggcaaagctggcttatataaataaaacagtaggtctgcacgctcctataaaggtacgcgttacaaaagagatagacggcaagacggagagcgctataatagacgctactgtcggaagattgatattcaatgaaaaaatccctcaggatttgggattcgtagacagaaccgaccctgataagagatttaatctcgaaatcggagatgaagttctcaaaaaacctgacgctaaaaatatcatcggcgacaacgttgaacccggtgttgataaaaagctgttaggtaagattattaacgccagcataaaggtgcatggcataactgaaacagctactttgcttgacgatgttaaagcaatgggatataagtattctacgattggcgctataactgtaggcgtttcggatatggaaattcctaaagaaaagaaacagtatctgctcgaagcggaagaggaaatcgataaggttgttaagaactttaggcgcggacttcttaccgatgacgagagatatcagaaggtaatcaatatttggaactctacatcagataaggttacaaaggcgcttatggataaccttaaacagcttaatccgatttatatgatggctaattcaggagcccgcggaagcgttaatcagattcgtcagcttgcggctatgcgtggtcttatggctgatacgtcgggaagaacaatagagattcctatcagagctaatttccgtgagggacttacagtgcttgaatactttatctctactcacggagcgagaaaaggtttgacagatacagcgctcagaacagccgattcaggttatctgaccagacgtttggttgacgtgtctcaggatgttattgttcgtgagcatgactgcggtacggatgacggaattattgtttcagatataatggacggtaatgaagttatagagccaatggcagacagacttgagggaagaactataatcggcgacctcgtttctcctgaaacgggcgaacttattgctgctgacggcgatatgataactcatgataaggcggctgaaatagttaagtcaggaataaaagaagttaagatacgttctgtggttaaatgccgcagtaaggttggtatttgttctaagtgttacggtatgaaccttgctactgcgaagccggttgatataggcgaagcagttggtataattgccgcccagtctatcggtgagccgggtacgcagctgacaatgagaacgttccacgccggcggtgttgctcagggcgatgatattacacagggtcttccgcgtgtcgaggagctttttgaggctagaaagcctaagggtgtcgctatcgttacagagggagcaggaactgttcatcttagcgaagctaaacaaaagcgtgagattattgtgactaatcaggagacaggtgaagcctttacgtatctgataccgttcggttccagaataaaggttcgcgaaggtcaggaagtcgaggccggcgatccaatcacagaaggttcgcttaacccgcatgacattatggctataaaaggcgagaccgctgtacagaattactttatacaagaggttcagcgtgtttatcgtctgcagggtgttgatatcaacgataagcatatcgaagttatcgttcgtcagatgatgcataaggttaagattgaaaatcccggagacaccggattgcttacaggttcgttaatcaatatatacgaccttgagaaaattaatgataaggttattgctgaaggaaaagaaccggcagagtattcagttcagttaatgggtattacaaaagccgctcttgctacagaatcattcttatcggcagcttccttccaggaaactaccagagttcttacagacgcggctattaaaggaaagacagatccgcttgtgggacttaaggaaaatgttattatcggtaagcttgttcctgccggaaccggaatgcctatatataataatattgatgtttatgcaagctatggcgcggttgcttctgacaataattcattgttggatttggacgctgaagactaatattagtttgatataaaaataagcatatgctcagcatatgcttattttttataatattgaaatgtgataaaaatattttgcggagtatattgcgcatattatattgaattctgtaataaagttttggctatataatcgtaatggatactataaaaattttattgattttctaattagttaattcacttatattgatagttgattactaagctatttatattttttaattataaaattatatttaacttataagaaattttaataaatatatttaatgagtattaaaaaatataatttaattatatagatataaaaaattataaatttctaattaatatattatttttattgaaggtaattatttaagctattttaatgttttaattataaaattatatttaaccataagatactatgataaatgtatttatgagttttgaaaattataatttaattattaggctataataattttatttgaagcttgttcaaatcattacttcaaattattattgtaatattggaattacaaatttatgttttatcaaactatgattcattctgataatccgttttcgaaaacatcgctttcattgctattattcggattattatcagaggattctgtagtttttgctgcttcatcattatctgtataatctgtcacttctactcttgataaattagacgcttcgttattggaatttgcttgatttgattcagaatcttctgataatttaatctcttgatttgagagaggttcttcttcagttggggttgtttttgatgcactatcaacgctgtcaaccgtttttgtcaattcttctttttcaataccgctttcacttctgacagaataagacatgctgtcgtcctcccatacagcggattgatatatatcatcattagattttaaaactacgtttttttctcctacttcaacctgttcttctttatcataaatattataatctccctcgcttccggcttttcccggtcctgttctatatgtcatacagtcatttttactattatattttatttgtactacgctgccgaatattaaagaaaagtcgtatggacggtagccgtcgggtatatatttcggtacagaaaaatcaaaagcagcaatttttctcagttcatcaatactgtttgcagactgcataggacttccgcttgaaacctctcctgagctgctgttatctatttgattatcatcagtattgtcgttttggactggcggtataatatttgaattgttttcatcttccggatttataggagtgttgtcaaattgattttgtccgtttatataactagagttgttttcagtataacgtggattatcagaaaaatcttttggttttacagcgctggcgtgccaggatttaatgcctgaattattggggctgttagaaatttcattattgtattcctgctcactatttatttggttagaatcaccggagttttcttcccttgaattgttgtatggaataatactatgattaacagtcggcggttctgtgtactgtgaagaataatcaaacgccgtgttttgaatattgggatttgatttaaaaactattatagatgtaaccgttaaaaccaaacatgcggcaatcccggccgcgcggcgtatatagtatattttgggggtgtatttcttttgattttttgcctgtaagattattttgttttttagttcgtcggacataactattttgtccattgcgtcattatattttttactcaaaatcatacatctcctttagtattggtttcagcttttctctggctctgtgtaaaagagaacggaccgtcgattctttttgtcctgttatctcggctatttgtgttgtcttatatccctcataatagaaaagatgtataacggtactgtatttagcgggcaggcttataacagatttgtatactaaattctctgaactgtattcatcataatatgggtgctcctgaacttcatctatagagcagatgtttctgcgccaaaatagttttaatttattcttgcagatgttggacgtcactctcattatccaaagtttttcatgtttttcattttcaaatttcccgttatattcgaataattttataaatacatcctgagaaacatcttcggcgtcctgcttgcttttcatatatgaaaacgcaagtctgtaaactgtatcgccatacttgttaacgagattttcaatattacaatctaacgcgtgcaagcaaacgcccccctttcaataaaatgataacacagtgaaagccgcataactgcggcttttatagttatgataacatatttatataatactttcaatcattgatttaagctcatcaaaagttataccgttatccgcatatattgaaaaactgaactcaccgttgttccattttgcattgtgcactttttgaccgtttccgctgtaagatatttcatatccgtttatttctgcagtttttgtaaattcatatgtattatagtcgccggatatatcttccaggcttttggcggttctgtaactgagttcgctttcgccgtttacgtatgtcaaatcaagtgcggtatttgaaatggttgttattttagataactcatagcctgccggcagcgctgttggaatggaagcgtcaattcccagactggcttttgcttcgtctacagtgttatattctataataggatttggaatctgaaccaatgaattatcttctttatctgaattgtcatttctagttatagtgatagtattattatcaatatttacacttatatcatcaagcagttcaaatagctttagtggtacgtaagttgtatcattcaataattcgggagctgccccaagcgatgatggagccgacatacctatagctgtggaactagcggtgtaataactgtcaagcccaatatagacagttgtatttttttcaccgttatctaaaaatacagcgttttcttcctcaatccattcaattttaaatccaagcttttctccgattaaacgaacgggcaccattagctgaccattattttcatagatatttgcggggatttgttcgttgtttattaaaacgtttgcggggcaggcttgtgttgaaaccagcagcggtactccgctgtcaatagggtcagcgtctgccaatacggctgttgtcaatgacaaagataatgctcctgcaagtactgcagctgtgatttttttgttcttcattttaaaaaacctccaaatttattattttataacttcatatagaatacaactcggaatgtaaaaatgttgcattttttataaaaatttttattttaatatttaacgacgataattgctgaaatgtttatatttttatccagtattgttataattataattcagttttaagacgcctcttttattattaaagtaaatagagaaagtaaaaatatccacttatttaatagatttttttaaagaaaaattattatatattttgtttctaaatcagagaacggctgaagctgccaattaacggactgtacaaagacaaacggctgattacatttcaatatatcaaacgtagatttataaaaggtataaaattggatgtgtaaatgtaaataaaattatatgatattttttatatcaagtcaaaataaaatttttatagtaaaacaattttaactttaatacagtttgagactatatttattataacatgatattgatataacataaaaatttatttatataaatatataaaatcgtaaaatgttttaattcggcagttataaggaaagtttaagacaggattatatttacgcatgtattaaggcttattacatttctgtttagttcaatgtgaaagccgggaagtctattcagtccatatcagtttattagtgataatatgcgcttttgtctttggtatttagtctttttaggcgacagattattttttctgtatagtaattctatctgtccgttcgtttatgtcagcataaataaagccttttacgcagttctaggtatcttaaaatgtgcaatcgacacagcgtttgactgtaactcagaatttcttttaatctattttgagaattatttctctctgaacattccataaataataccagacggacaatctgttaacaccgcggtttgaaaaagcgtttgcaaaccaattgcaatgagaagtatacgcccattttccagctgtataatttttattaaaatcgcttttttaaaaattttttaacctgttcttagttataaccagaatttcaagttttttagctgtatgttttactattatttcgccgactcatcaaaattggcggcggttattctattttaatgttattaaaccggatttctgtgatatgtctgccgctgttttcaatattctcaggtattgaggtgtgacgtttatcaaatcgtataagtctgcgcgcaaaaacatattgacaaatttcaatatgatgtatataatataaatgaatatagaaagaaggaggctcggatcatgacagaagatgaaaaaaacgcaaggatattcaaagctttttgcgactcaaatagattgaaaattttaggcttgctgcaaagcggagaaaagtgtgcgtgcaaattattggaagaacttaatatcgggcagccaactttatcacatcacatgaaagttctatgcgacgcagaaatagttgcagggcgcaaggaaggaaaatggacgtattattcctttaatccggaaggcgttaatcatgcaaaagaattgcttaatcaaattacaacggtaacaggcagcactcaatgcagccgtaattactgataagccgcctaaagtacgggcggcttacaaaataaacaatatatcgatatattgcgatgtgtaaatggattggagggtttttcttgcagattattatatctatattgaatttttttcaagatcaagtgttaggcatgaaatggctgaatgcggtgatcggcagcggtttgtccgccgttggtcttgatcttgaaagcaaggttggcgcaagtattcagtttttcatttacgatacaattaagattactgttttgctttgcgtacttatttatctgatttcctatatccaaagctattttccgccggaaagaagcaaacggatattagggcgttttcatggagtaggtgcaaatattgccgccgccttgcttggaacggttactccgttttgttcatgttcttctataccgcttttcatcggctttacaagcgccggtcttcctttgggcgtaacattttcttttctaatatcgtcccctatggttgatctcggctctctcgttttgttaatgagcatattcggatcaaaaattgctgccgtttatgttcttgtcggtttagttatagctgtcgcaggaggtacaatcattgaaaaactgcacatggaaaaacatgttgaacagtatatcaaaacagctggaagcgtagatattgaagccccggatttaacaaaaagggaacgattgaagtttgcgctggagcaggtttctgctactttcaaaaaagtttttccttatattcttgttggcgtcggtattggtgcatttattcacaactggataccgcagacttggattgaaacagctctgggcagcagcaatcctttctcggtgattttggcaacgcttgtcggtgtacctatgtatgcggatatttttggcacaattcctgtcgctgaagctctgtttgccaaaggtgctcagcttggcgcaatcttatcttttatgatggcggttactactttgtccttgccgtctctcataatgctgcggaaggcagtaaagcccaaactgcttgctctttttattggtatctgcgcaggcggaattatcattgttggttatttgtttaatatatttcactattttttggtttaaatgaaaggagattatcattatggcactttttggaaagaaaagaaaaaaagaagaaaccgcctcctgctgcggtaattgcaatgctgaaagtatggcacaggctgaacaagcaaaaacagagggggcaagcgttaaaattttaggaagcggctgcacgaaatgcaatcagcttgaaactgctgtaaaggcagcgttagagcagcttaacatggatgcgtctattgaccatattaccgatttttcacagattgcagcttatggagtaatgactaccccggctcttgtcgtggacggaaaggttgtgtcttatggaaaggtgctcaaggtcgatgaagcagttaaaattttgaatagagttaggagttaattctgcggagtgggctcttcgctgaataatacggttgataatacatgaagtaaaaaatgaattgctgtaaaataggcggaaacacggaggttttgagagaatttcaagccttcgtgttctttttaattttttatgagcgtaatcgttttgtcttcaatatacgccgtttactatggagaattacgcagtaaaagccgtaaatgtaaccgcgaattgctcatctgtttctgttatgtgaaggtataaatcatgttatacttttactgttttaaaagtgcttacaatctctcatagattttgaagcctatgcggttttgcccaaaaaatcccgcggaaaacgatgattgaagtataatagaagccgcataacatttgtattatgcagcttttacgtgtttttgtgattatatagagtgctgaaatggattttttgagaacaacgcgaaaaaatactgtttttatgtttttataggtcataaaaattttataattgcatagaagtctagcatatattgacaaatcttttaaaataccatatactagatttatcaatttatatggaggaatgaatgatgagtttagttataaaatcggttaatgataaagagtttgctcagtatggaagagtggtagaaggtatagagttcagccggcttcttgataaacttaaaaacacaactccggcgcctgctgatgaggtcatttatgtgccgggagatagtaatttggaatctatgccggaagcggagttgctcagcaacaatatatacggcggtatgccgattcaaattgggtattgtaatggaacaaacacaaagctgaactgcctggaatatcatagggacagcgaaatagatattgccgctgatgatgtggttcttcttttgggaagacagcaggacgctatgggcgatagctatgacactggattggttgaggcttttttgtgtcctgcaggcacggcggttgaactttatacaaccacactgcattatgctccgtgcagcggaaaactaggagattcgtttagagttattatagttttgccgaaaggaactaacagcgaaaagcctgatatagaaattaaaaatgatgaggacaagagactgtttgctagaaacaaatggcttattgcgcatcctgaatcctctgaggctgataatggagctgttgtgtgtctcaaaggcgaaaatatagatattgcggaattaatctaaatataatttgaaaggggaagagggagtaatgagatgttttaattgcggcgcggagatagagccaaactctgttgcgtgtccgaggtgcggcgcaggcgtgcgcaggccaaatgctgatttgacggcggaacagccgcctttgcgtcagccgggatataatatgagaccaaaccagcctccgagaggaatgacgccgctttacagtgaaccaataggtcagcccgtatcggtactaagatgggtaggacgtatgtttctgccatggatacctattgttggcggtttggtttattttataatgataattgtatgggcatgcggtgataagtttgatgaaacgtcaaagaactgggctattgcttctattattatgatagctttcaatttgctggttacaatagttatattttgtattttttatgcggtatttatggcgttgtttaacgatgcgtctgttcaaagggatttacagatgttctttgattcggtgccatataatatataaattaagttttgagaaaagtaacaattaatctatttaaattgtgacgttggagtttatagatacaaaagtatgtgcggttttatcggcaatgcttgtaatgtgtattcttatttcttgcggaaataattctatagttggtatatgggagccaaatggcagcggttatgaaatggaattttatgatgacggcactatgtcgtcaaaacatgaaacaggcaaatatgaaacaatagataatcatttgagaatattagacatgggttttatgggtcatgttctatcatatgattatgagataaatggcgatactttgatactgattaatgacagcggaatcagacgtgagtataccaaaaagaaataagataaaagttcaattaagaatattcaaattttttaaaataggacttgcaattttgtttagaatatgttaaaatctaatgcggtgctgaaaatgacagcggctaaattcggagaggtggtcgagctggcttaaggcgcagcattggaaatgctgtgtacgtttatagcgtaccgagggttcaaatcccttcctctcctccaaataagccaaaaccgccgcaaaacggcggttttgttttgccttaaatgattttttacacaattttattcaaaatatttaccgcttgctcttattttttggggggatatatggggatatgtattccctgtcgtattgacgtctgtataacgtaagcgtcgggcaatcccatgtatatttatgccttagtttgctatcagcgaggcgtggctatgactaaaatcgtgtatgcttatggttttcagtcttgatgattaggcaaactgttcgttaatttttactaatctagaatctttgagcggacatgtgtttcctcaaattctgaaatcgtcgttaaaggctttgtgcttataccggcgttttttatgttcatctgaaattttaattaataatatttggagatgcagtgcgcgtattaagcctatattcataagcgatgcttctttggcttagccccttaattttttgtgatattctgagcgttacgttcagatattttctatcaatatcaatcaatttcaaaacgtgtattttgtcctttctcagtacggtgtaaaatgcggaaggatacataataatcccagccatttaaatccggacaagtttcggcgtgtttaagcgcagatttggcgtatagtttaattcttcatatatgtaaaaatccatttctttgtttctatagtatttttaaagtttctatgtcaactgggtaattagataatcaagtttgacccggataccggagaagtatctgatatatacgcagggacgccgtttgagggtatgatgattatagcggccgggagaatttctactcatatgtgggaatctgagagtgggaagaaaaattattccactgatgtaacagtaagcgagataagttttggagagagcaaaaaaatgggtcagggcgataatgatgtgccggatgatatgccgttttaattttgccggctgttatataaagcaaaaagttagttaagcagttaatttatggcacgcactgtcatttacattaaagtataattaacatattcatagtatcacaactaagtctgattattgataaattgttttaagtatgttcacgctgcgcgtgatatgacagctcacctaacgaggcgcacaagtgcgcaatatatcacaactaagtaaatttattatatgacaactaagttaattattggcatttatagtttgtataacacaatatagtttatataacatacacttttaaataaaagtgtagccgcaattgacattgcaatctataacaaaacaagttgttttgtatcacacccgccctacagacggggtcacacctaccgtagttcacaaaaaacactgtgttttgggtaaatatttaaaaaataataaaaaatgttgtttagcaagcatcggtaggtgtgaccatacttttcttaaaaagtgtgtgttatacatatgattttattttgccataatctacaatgtcattattatgaatactcaatgcagatgaaatctgccgcgtaaggcgcgcagccgtggtaaagtttattaatagtctgtattaagtttcagtaattagtattgttttgaaaataggggtggcattatcgtttgctgaaaaggcaggttgtaatgttgttccgtaacaggggtggcgctgccgttcgtataaatcgggttgcagcgttgttccaaaggagaattcttatgggaaaagaagcatttgatttctttcctttagacgtgcatcttccatttctttttctggcaagaaaaagaaacgcttcaccaaagaaaaagtgcttgctcgcttaggtcgcctgcggctccaaagggcgctcgcccccactaatttcatcttgaatctgcgcttcaagatgaaaaagccttgtaactttcccgttggatttttgaactaccgtgaataaagattttacgagttagtattaagatagatttgagcaaaaagtaggtactaattaaaacgaatataaaaaaatatagaataattataaaacttatcaatagattagaaaataaataattagtttgtatattgaacactgcgtgttcagatgttggctcacctaacgcggcggcatagccgcccttccgatgttcgctgaaccccagcgtttttgacgaattaaataaataggaaactcgaaatatcttttttcacggtagttcacaaagtcaacgggaagttacagggcttttttcatcatgaagcatggcttcatggtgaaatgagcgtagtgcgagcgccccttggagccgcaggcgacctaagcgagcaagcactttttctttggtgaagcgtttctttttcttgcgagaaaaagaaatggttcaaacacctattataagtaaaataatatatattatatggggtcatatacatagtatataatttaaaataatatatagtaatataatttaaccctctttcgtattgaaagtattatttaaatatgatataatatattaaattcagggggggtatttaatgagtaaaaatattggatttgataacagggatcgttttattgaattaggtattacaatttccgcaataaggaaaatgaaaggattatctcaagaagaattagcaataagagcaaatattagccgctctcatttgagttatatagaagctccaaatatcgtgaggccgttctcattggaagttttatataatatagcagatgcgttggacgttagtgccggtgatttgttgaatataaaattcccatttagtgatgtaaaaaaagaatctaaatgattgaaacaaatactcttattatattttaagaatgaaaccatttaaaccattgaaactaaaccttgtatattgttttttataaaaaattatgttttttcaaacgtcggtaggtgtgaccacacctgcgaaagtgggcgtgagccttaataactctttatccgtaacccttcaacgtcaataatttgaatactcaaacgcggcaatgccgccgctttaggtgagctaacatttgaacacgcagcgttcaatatatcgttaacaattataaatataaaaataaaatattcttgacaaataaagagaaagagaatataataaaagcagataaaaggtaaccgttaaacggttgtcacaaaaacagattttaaattatataactgtcctgtgtcagaggacagttatattgcttttatggatactattataaaaattattataatagatataattactttaagtaagtatttccacataagcgacacctcccttctgctgtaagtaacagcatatggagatgacaaccgtcctacaattcccttttacctgctaaaagtaattatatatggtatatcgaataaagtcaaattaaaaattctttacataaattcacattttttaaaaaatgtaggtttgtcaatgatgtgttacaaaaaagattaaaagagttcaccgaaattgataaaagagttgatgtagtcaatgggagcttttggaaagctcccattgactacatcaactcttttatcaatttcggtgaactcttttaatcttttttgtaacacatcattgacaaacctacattttgaggaattttgtaataaattttatattatacatatgtttccgtaataacgttaattataaatcatcattttattattttcaccattttgacaccattctgcttctaattaccaattttccaataatgttacgcccttatctatttgagtctttaaaatgtgattatagtcttgtgtgatttcaacatttttatgccctacccagcctgatataacatttaatggtattcttgaatttgtaaattatgttacatatataccttaatccataaggttctgtgtgctcttcattttgtattcctttcataaaattattaattctatatataaacatcaaagtgagtatgaactgataaatatattaaaaatattctttgataaaatattacactttctgtcactgcttagattaagtaacttcccaacagaatctattttaaataatcctttaataaaaaatatttaaaattttaataaacttattcttttgctttttatcaaaattgtattttatagttttcttaaaatataaaataaatataaaaaatatagaacagctttatttatcaattatacttttttgaaataataattatattttaaaccaaaaaaacatagtaatattatgataatttacttgaattttacaatatattatattacaacatataatacatgggtggtgattatacactaaataataatataaaatataatttatttgaaaggttgtcatacaaaacattttattcgaaataaatttagtattttttataatttacaagtggataattatttataaaaaatttttaagtatttttctatatttattgattataatctcaaataaaatgtgtaactcaattgtatatgcaaacgaaaatattttcgataaaatagacgaaggtgtcaaactgaatagaaatctcaaacttactaaacagttagaacaacactatgatggatatactccgcaaatgtattatacattggtttttagtaacaacattcaatcattatgcagtaatacacttgagcaagaacaactaattgacttctgggttgaatagttttctgaataaattttaaaatacaataattatcttataatatcaaaataacataattataaaaaattaattctataaaaaaggttgaaaatgatgaagaaatttatttttaatatttttaatagcattaccagcaaccttttcctatgtttatgcagattttttgaatataaaccaaaatgataaaagcataaggctagccggtaacggcaccttagaaaatccgtatattattacttcagctcgtgaacttgatgaaatacgtaacaatttatcagctcattacaaactaggaaacgatattgatttaactgaatatcttagcgacgtcggtgaaggttatgctaaatggaacaaagaaggctgggagcctataggaaaaccagacggttctagaaacggatattttaccggaagctttgaaggagcatatcatattatatcaggtttatggataaaccgaactgattctgataatataggtctcttcggtggtgtaaattcctataataatgatacatgcatataaaatcttggcataaaaattgctgaaaacggtatatccggcaacagcaatgtcggcagtttaattggtgtttatgctacacaagataaagtcagaaattgctatgtaacaggaagcagcgtaagcggtgcaaaaaatgtcggaggtttgattggaaaccaaaatgtacttggcactacagttaactgttacacaaaaacaaacgttatatctgaaaaagatagtatcttaaacggaaatatcggtggtctgattggaattgcgagcggctcggttatatattgttatgcctcaggcaatgttaaaggaaaacgctgctgcggtggattgttagggagccttgagggtatggcaactgctaataactgctatgctacaggtgatgtcataagttctgatgatctcgccggaggtctaatcggatatttatacgatggaagcctagcaaattcatgcagcaccggcaaagtgcagggaaatatctacgtaggcggattagtgggtaagcaaggtggactaagcggcatcagcaattgttattcatcaagtaacgtaacagcagctagtgattatgccggaggcttggttggcgcacaaataagcccaccatattttcagaatttcaatagtataagcaattgctatgctggaggaagtattgaagaaacaaaaggcgaacactttggagccatatcaggttacttagatgaagaaagcagtatttcaaaatgctatcgttataatgattttactataaacggaaataaaattttagaagatgataaaaacagtgctccggataagattaacggcggtataataacagaaccaaaaccagctcaggctccaaatgtaaatattacaatatctgaaacagaaaatacagatcaatccgtcgctgtacagttggaaattatgtcaaataatgaaattaaaaatgtgagctatgttagagtagttcaaaaaataaatccttcgaacataatatcaaatggacatattacatcggcagactacaatacggatattaatcttttactttcagattttgaccaatatagtgaattaacaggagaaagcgaaaatgctgctgttatttatgactattatataaatgccggatatccgaatgataacgggaatacaataactattaaaaacaattcttttaaagtaaatcaaaacggtgaatatattatatgtgcagaagatataaataacaataagacatttatatatataaatattaataatataaattcaacgccaataaatacagagcaacccacagcttctcctaactatctttatgatataaaagacttgtccattctttcaatttcaggagataaacttgaaacccctccggaaaatgctagttttattgttgaaactagtgttaacaagaaaaaggacaataatacaaaggattatatattcgttgccatatatgccaagaatggaatactgctgaatcttgattatgtaaaagcaaattttgcaccaaattatgactgttcatttggctttaacatcccagcttcactaggcgaaataggggaaataaaaacgtttatttgggataaattcaattctttaaatcctcttgcggaaacaaagtccattagtttcaaataaacaagatgattgaacttaatagataacattaggatacaatatttactgtgtacttctctacaacaccataattagcaagagaagcggctaataaatacgaatattcatttttaatagaatcttcaaacatattcaaatctgtgcttgaaatataatcactcggtttaaaattaggatcaatttcaccatcattttcttttaaaagcataaaatctgcactatttttataagctgttaaattatttgttcgtatttgcgtatgtactgtatcgaagtgccaaatattatccttttcttcatcaggaatattactgccgtaaaaattaagcttattgttatctttatattttagagccagcatatcgtattccgcaccattacctattcccattatcgttggatcactttgcgggttaatatgtgtagaccatctattctgttggtcttcgtacaaatttgataactttttgccaaatggatttttttcattgaatacactaccttctaaatatgtaccatctgccatactatcagaaatttcaaaccatacttccgaatttacttccggtaatgaatcagctacccctttatgatgattttcgaaaacataagaagcatcgccttcccaattgaaattgccggaatcatagttcgccttataagccattatatttatatcagttatacccttatcaattgtaacactgccttcttcgaatcgttctttttcattaaatgaatcataatatgtatagatatcataggttccgttagaatttttagcagttaatattctataatagagcttacacaaaataaatcaatttgactattaataaaatataaatgttcatactaccagcgtctgtatgaagctttgtttgaaataaagtttagaacattgccaaccggcagatcattatcatttcagtgtacacctcccactgaaatgataaatgaaccctgtcgtcaaagagacaaaaacatctttttgactggggtataagtttagtactctttatctttacttcttataacaaaactgctcgtgtcgatctcataagttccactctcaaacatttcatagacgaccataccggagaacttatttcgttgtccgtaaacataacatttactgccatcttctgaaaattctccattatctattgttgtggtcatctgatttttaaatttatatgcagtaaaaatagcatcactcatattcatctgaataccatttctataaaactttgcaatacttgtcatccactgccacttgaacaaaagcattgtgcattcctctgtatcttttctttccaaaatctgcggttgtcctgccgttgcggcatcgcctataggcaaattcgttttacctgttaagaaatccgataattgctgttcgtatgacaaaacgccatcctcaacagtttctatgtataaagctctttcactatcgttatacgcatgccttaattccatattcggcatatggattataagatgaagtcttattgctttcctgcacttctgtatctgatatgtcctcagctacaacaagcatttttcctcccatgttttctgccgatgtttctataccattgataaatacacgtatatctgtttcataagtattcccggaaattccacctatactgcctctttcataacaaggataaaagtcttctgcaggtcttcctgttttatttacaaataatgctcgtatactatcgtcatatcctaccgtataaccatagttacgcaaatcttccgcacagatcatcattttgccatccaaatatgttacaatatctgtattatagattgtgttcttaatatcactgctgcttgcataaacgtttccttgtataatcattaatgtacttaataacatcatcattgcctttttcataacatgcatttctttcccatttttactttatcattaaagtccatttttataagtctcttaaataaccatttcgttatatgttatatatattataacaatacatttgtaatttatcaacaaaatttcaccaagtaactatacatacacataaaaataaggcgtaaacaacaaacaaaataatcaaaaacttttgattcagtattttaatgcataaaacaatgctgctaataacaaaactattccctgtttgaagcaaatttatattctgaatgcaaaagacgtatttaaaatacataagtgcctttagttttatttttactatttatttgcaaataaatcaactatatatgccttgaaaacttagaaaatcacgattgcagcttttactaaaatgacaagacaatatggctctgttggtacacaaaaagaaaaagttgacaacgactttaagccgaccatatactggatacggaacatattcttgggatcagcttataactttgcatagagagggaaccacgatatatgacacaacttttcagataatgccaaataattttattcaagcggcaacgtagcaagtcacacgaatattttcttatgggaatgaacgatgcctatgaggatggagcgtacatgcgtgatattgatactttcgtactgactaaagtgaatgtgcaaggaaaacggtttaccacccaggctattccactgccatatgtccttgatagaacaaaattttaaaatattttttatgttaggtttacattttaaattgtttcattctcttttatttatgaaaacgttttacattacacttaaaacaaaaaataaaaatttgaaaaaagaaagtttaatttatatcaacttacattgaaacatctcaatactcaaagcaatatgataacattacatccgctacatactttgtatacaataatttaggtggatatgtatataagtcatacgaaagtatttacggtgctccagctctttttaaggatcatataaaaccatatgtagaagctaataacggtgctcattattatgtacacactccatataaaagctatacttctgccagtgacagaataaacttcaactctgtatcacatagtataacagctaacataactgcatatatttcattgggtattatcgctgtaggaacaaagtatagcagttttgatataggaatgacttatgataagaagaattcatcatgggttccctgtgtgatgacacactcgaattacggatatacaactcctactccaattacggtcggtaataacgtacctcttaataatttttcaaaaaaattatccatcaactagatactgtacaacgaaaattgaagtggctcgctcaggtaatacagatactgtaacctatacataaacatacgaagatgcaggtggcaccacacttggaacgtgtaccaataaattcaattttgcagctggtgatttcttcgaagatggaacattaaaaatgagatttacacgttttatatctcttgtccccacaacaagaacaaatgataatgcaaataattcgtatctaaatgcaggcattagtaatttaaaactaaactcatcaaattgaacagctgcacaaattgactatgcatggtcagtacagggagcaaaatacttgaactaaacatctcaacactatcaggaagtgcatccaatgctgactccataaagattaagcatcagtatcagttgcattgacatcttcctttgatacaaaaattaggtatgttttaatacctcatacattatcatagatttatattttagaatcaaattttatatgcacatctaattgcattatagtataattctagactgtttaggatgcacgtggtaaaataattttaccacctgtatcctactacatttttcatttcgccatacttgttatactgttattcaatttcaagtacgcataaatccccaaaaacaagttatactctactcaagtatggatggtttttattataatataattatttaacaaccttacctatagtgttatactgtgtcatatcataagcgccacctatgtcagtataaatcaaaaaacacgaactccaatcatatgctcatgaaaattgattgatttacatggtaaagtataatataattatagtaaaatacgataacaggatgtgatttatatgaaaaaaactatactctctttcgcagttacagggttcataatgagcagcatatgtattgtggcagcgatgccaggtgatgttatacgtccaatatattctacagatatactcacatatatggacggcatcccactccaaggatatgcaatagatggaaaaaccatgatctgtcttgaggatctttcagattacggtttcagcgtgtattacaacgacgacgcacgcgcactatttgtaaataaacacagtgaagcaattaatggctttaatccggcaatagaacgcggcaaagttggagatattaccggatacacttatgaatcggatatacgagcttatataaatggacaggagatttcttcagaaaacatcaatggccgactcgcagtatgtgcagaagacttggctaatatggacactgttgtcactattcgtaatttaggttttgaatatcctgcctacttcattcgctacaattatgatgatacttctagagcattgtatcttttttcagatataacagatcataatatttacaataataatatcactgattttacaaaaggaataagcgtgtccaacggactttttactgtaatatctgaatctaaaaataactcttatacacaatatgcagtaaaaggtatataccgtgatacctctaattatgatggatgcaatgctattcgattttataagagtggtcgtactttcaatgcagaaaatgcattgaaagaatacggttttatcgcttctatcatgaaagacggcatctcaataaccgatatgagtttttcatccgatgggaaatatctctgcttttccggcgaaagaagcaaggcaatacccaattcacttatgggagtaagaagcgtatatgaatccggcgaatatatgctggatatggacacctttgctcttactaaggtgaatttgtcacaagcgttaaaatagaaagttacttcttttgcctttggcgtgttgtcaacgctctgcgctcatcaattataacaataggatttgtgtcttgaatgtaccgcatagctgtttcgccgttcagcttatcctgtgcctgatttataatattttggctctttttaaaaacatctatatttattatcataatttcaatattgctgcttgttgcaaactgctttacatcggacagctttgcggagttgtatataaaatatctgcacggcacattgtcgtattgattcataaaatgttcttttgttatttcaaatgatttatatacactttcacggattgcaaccaaatgtattttcatcttgatacacagatgaaagagaatttgcttcttcaaaaataataatatcccattttattttatcagcattttcaatatttggggttaagtattcatatatagtaaggacaattccatcatagacaaaagaatcattctcaaatgcaatacaaaatggtatactgtatttttcagaaatcatttcagcccactgaacaagtaaatcaggatttgggatagctattaagatattattttctccctcataccaactttgagaaataataaacattgctatggctttttcccatacatgcttcatcgcacagaatcacgcctttttgataagggttgcgaacagcaaatagcgcggctgcaacctaataaggatacacatcaatttttccctccgcaaataccggaagaagtgtgtcctcatttaagacacctccgaaacattgtttaatcttacaaaatattatatcaataatcaccataaatgtcaacgtatatcgttctatcgcacaaaagaatcgcacacaaatgtgattttcttatatttaagttattattgatatatacaattgaacagcggaatgctaacaggtctattaatcatgccttaacctctcgttttctatttgcttttgttttttatatatctgttcaatgtttcttatttctgatagagcacgcttacagaaatctttttgggccgacaacaggcttgtatgatagttcccccaatagtaatagtcaccgtttttacatttccatgtaacaaagctattaggcaatttggggtgaacatccagcacaatttctatttcgccaaccttaatttgatttataattaaatatcctgagtttattctttggatatccataaaatcctccactataaaagcggtatcccttaatatcatgagataccgctttaacgttcatattcctttttacgctgccgctttttataccagtcgtctaatagttttatcataacatcctctatctgcttttcagtataatcttccgggaaatactttttaaccttatcacctgccaatgttattttaatcttttccggcttctgttcctgcataatagaatctataacattgggatttagcttaccattctgtgaaaaacgccgcatttttgcagcctgtgcaatagatggtgaagcctcctccttttcgattgaatttagaacctctgcctgttcctttggtgcctaaataggataacccaacagctgcatttaaggctattttcttttcgtcaaccatttcaagtaacgggtcaattagattcgtaaggcgtatgtaacttgtaatttccataagatttactccagcttcttgagcaaattgttcccgtgctgttaactttggcacaaattgtgcagatgttaaatctgttctttcaccttgacgtttcatagcttccagcttcagccgatacgcaaaagccttttggctcggcaggatattttctctttgtaaattgctgtctaccagtaaaattgccgctgtatcatcgtcaagattttttactacaaccggaatctatgtaattcccgtaagctcacatgcttttatacgtctgtgccctgaaagaatttcatatccgccttctctatgaggtcttgcaataataggcgataataccccattttgttttatactctccataatctcctccatactttcatcaatcaataccttaaacggctgctgctcatacggctttagttctgatatgtttacagtctgtattatttctgtattgtctccatttccggtttttaatattttattctccataatagctatcacctactctctcattttttcatatcatagcgcacacgccagtcaatatatacatctgaggtgctgtatgaattaaaaatagcagctatcagatagctgcgtacatttcgtatcttcgtacagttttcattcattgccaaaagcatattgctgatatgtgtgtaatttattttcatgaaaatactttttaccacaggagccgtatactgtacatggttaatataatagctttcagccggaaaagtcagaacatccgccataatatccacaatgttgtcaattacctctttttcctcatgcagaattaatccctcatactctatatttctttttacaagctctctgtatttttcataatcctcaatcctatccattgaaaaagtttcacttgctgtattacacgatagataagattgatgatttatatactcagttttattattatcagtattgttatactcagtattattaatattagtattaattgctcgtgattttcacgattccggattcgtgctggttctccggcgttataacaaagcttttaacatatataatatcagtcttccccaatccctgacgtctccgttctatcaagcctattcctgtttccttatcaagctcattcaataattttgttgccttattatcggcacacccgaaatcctccataatattttttaaggtatagattatatataccttgttttcatcgtcaaaccatctgtttttaactgataatcccattcggtcaagcataaatccgtataatacctttgcatcggttgatagtgatttaaacgtcttatccttaaaaagaatttttggtatacggtaaaagctgtactgctccgcctgattaccatagtaataatcaaatattattttctccatgctgttccacctccttattttggtaagtcaagaccaccagtaaactggtggcttgcacagcccctataaggggctaatacaggcttaacccctgtaaggagcacagaagtttgacaccgcattactatcacaggcagccgctcacgtgcggctgtattttttgcctacttattcttgctacccgtaaacgggtttaaatactctttcatgcttatttgatccgatgcataatcctcctcaagttgattcctgatatattcggatattatttttttatttctccccactgtatcaacataatatcctctacaccaaaaatttcttgaaccatacttatatttcaaattggcgtgtctatcgaatatcattaatgaacttttccccttgagatatcccataaactgtgctatacttatatatggtgggatactaacaagcatatgtatatggtctaggcaggcttctgcttccattatttctactcctttttgtttacaaagctttcggagtatttctcctatatctcttttcaactgaccatatatttcttttctccgatatttcggtgcaaatactatgtgatattgacacctgtattttgagtgtgctgtgctctttatttcatttgtgctcttctttaacattattaaaaacctccatgatatattttttgtaatgcggtcgccaaaccatttactattatatcatggagatttttcttatgctaaagctttttatcttcctccggtagaaccgaaggtttttttccacgtctaaagaccccaacaaaaagagctaactgataaatcaaatcagttagctctatatttatggaacaatacaatttatgttgcaggtgttgccaaaacgttgccacaagatatatccagaacggtgtaacccgcactgaagcgtttctttttcttgcgagaaaaagaaatggttcaaacacctattataagtaaaataatatatattatatggggtcatatacaaagaaaatataaagtttttaaacctttattattagtgttatttatttttttcaaatgttattttaattttatgagccttagagatttttcttaaagtgtttatattatatatagtatctccagcttcataacttctaatagttctttcttttagacctatgctttcggcaaattctttttgagttagctctgtccattctcgtaatatctttattaatgatagtatataaactagaaaaaacttaatatgatttgtatattgaacactgcgtgttcagatgttggctcacctaacgcgcttgctaacacaagcctaccgaagttcactgaaaacccagcttttttatgagttaaattaaatagaatctctatttttttaattaaattaataagaactcggaaaatctttattcacggtagttcaaaaagtcaacgggaaagtaacaaggctttttcatcttgaagcgcagattcaagatgaaattagcgggggcgagcgccccttggagccgcaggcgacctaagcgagcaagcactttttctttggtgaagcgtttctttttcttgcgagaaaaagaaatggttcaaacaccttattatgtaataataaaattttttatatggggtcatatacatagtaaatataaagctttttaatcataatgtttaaatcaaattccttttgagtgagttatataaggataataattatttcaatttgttattatctttataactttctattagactgattattagttctgtatctttttcattaagcttattaattccatttattattttatgtattttttcaggatactttatattttcattaaaaaattcatatggcgttatttcaaaatatctgcatatttcaaaaaattcactcattgacggcatagcttttcctgatgatatatgatttatgtatccttctgaacgtcccatatctaaactcatacatctttctgatacattttttctcattcgcaactcagttattctttcccttataaaattttcaaacatatatattctcctaaaaattgattttttatattatttgtattatacactattttgttgtaattttagcgaaagcgtcatttagaatgacggtaacaaaaaaagtgataaattgaaagaagaaaatataaaaattgcataaattaaactattagttcaaaaacaggtatgattgactatactttaaaatatgaaaaataggaatataatctaacattacatttgatttaataagataattaaaaaaatatgtgcacgcaagcgtgcggcggcagctcacctaacgaggcgcataaatgcgccctgccgaagttcactaatagcattttaatatgaaatattttatgatagaaaacgtcgttagctgtaaatacatttaaaatttatatgtcatattaatctatatcttattgtctaaaaatattaataatattatatataatacagatttaatctgttgctttaggaagaatagtaataccccaggacatgagggacgaaatgcaaattagaaaaaaagacgaagtatctataattatgagaggtgaagaaataagaatcagaaagacagaaaatttctgtattgcatgttgcgaaaccgaaaatcttataaaataccaaaataaatatatatgtcaggactgtatagcaaatattaaaaaactatagttaagaaataaatttacaaaaccacactttattataaaaactatcatagctgaaagcgtaacaatatgataaataaaaaatctgtgacggttattgttccgtcacagattctataaaactatttatatgatgacttaacctatataacatatttgttatattaaaatataacttacttcacgtttatttcaataacctttttattgtctgtttttgacacagtgattgataaactttcatattcaaacgaatctccgttttgcggaagcctccctaactgctcagttacccagcctccaacagtagcggagtctgaactcagcttgagattgtatttcttttcaaacttgtctaaatcggtctttcccataattataacctcaccgcttgggagctgcttaaactcatcatcttcttgatataaatctcccacaagtttttcaagcaggtcggttatggttataaccccgtatgttccgccgaattcatcggttacgacagcgaaataattgtgactttttttcatattctgcaaaagtatgtcagctctgatactttcgggcacagcatacgcctttactacggctttttccattattatatcttttgtagggtttttcagtataaaatactttctggcgtctaataaccctataatattgtcaatggttttatcgcatatcggataatatgaatgttccgaagcggtgattgtttcatgccatttgtcaatatcgtctttagtccacagcacatcgagctcggttctgtgagttgctatttcgtcagcgtgcatgtcgtcaaactcaaacaggttttgtattatttcattttcttcatggtctataacgcctttttcacttccggcgtttgccatcattcttatttcgtcttccgtaatttcttcatcctccgcattcgggtcaatgcccagcagtctcaggatagagtttgttgacgcggtaagcagccatactataggcgcaaacagctttgaaatcatagatactaaaccggaaattgccagcgctatactttcagattttcgcattgccaaacgtttgggaacaagttcgccaaacacaagtgtgaaaaatgataatattattgtaatcaatactaccgaaatagtatcgagtgttttttcggaaacaggcaggtttaacttcattattgcgtttacaagcatatcggaaaagttgtcggcggcaaaggcgcttcctaaaaatcctgaaagtgttatagcgacttgtatcgtggccaaaaagcgtgccggctggtttgtcagccttgccagtctgagcgcacgcttgtcgccgtctccggccagtttatccaaacggttgccgctcattgatataaccgctatctcggcgcaggcaaatatggcgttcatggctataagcactgcttgtaaaatgatttgtcctgttaaattgctgttcaaaattaaatcctccttttttaatatagttattttgaacatataaaattttgattttctgccggtaagaacttaaaaacacaaaaggacacaaccgtatcaattataccaatacggatgtgccctatattcatattaaattaattaaattactactgtcactgtcgtcgtctgacatttatgtatattcctttccggcagattatcaagcacaatatagcatatattataaaatttgtcaataatatttttataaatttttttaaaaactagaatataaaaataatatgtactaattcaaataattataacaaaatttattgcacaggttcatatacagcgtcacatcgggtaaaatctgagaatatagtatttgtgtattctccatttaccattgaccgatagtatggtttgccgcggtataagagagaaccgtctgtttttataatatatataatcgaactccctcccgcaaagtctttaacatcatctgcgattttgaccatgtttagcacattcttttcatcactgtcggtgagaatgtgaccatattcattttctcctgctccccaaagagaaccgtcagattttaacgcataacagatattgtttgctgccttgacattgatgaatccgtctcccagcttgacaggagaggtgtagttggacatcgatgataaataatcatatgtctcgaaactgtatgtttcaatatatcctagttgtccgccgtagcttgcgccgaatccccataagcttccgtcttgctttatgtagtagtatgtattgccgtcagtcgcaactgacatagcattgtcggcacgctttaccggagctgagtagtcctttttgtctatccattcgcttcccggaccgggcgcgcttctatatgtccaaacgcttccgtcattttttagataaataacatagctttggccggaaaattgttttacatcacagtctatttttttatatccgtatccaacatcttcccaaagtgttccgtcggtatcaatgtaattttggtatgaagcggagacggcgttttcaacagtgcacacgtcttcagtctcatcatccgatgtttttatatacagtttattgtctttagccaacagccagttttcgctgtagtttccgtcaagtatatttcttcgtctgtatacggcgtttttatatgagtcagtagaaaacggtgcggtatataaattatcattttcatctattacagatatttctgaataattgtttgttccgaatctgtcaaacttgggcaaataatcgcattttgaaacatttaaatcaccgttgtttataacgctaaggtctgaaacgtttataccatacagatagctgctgtcaataacagcggaacgaataaaaccatcgcgcctgtcaatggttgaagtggttgaatcgttgactgtaggccaaaaatgatatgtgctgtatgaatgctggaatcctaaattatcaccaagctccttattgccgaatgtaatatattcgtctttagcaatataacttccgattgtgtattcctcggtaccggattcataataaaatccgttttcggtgccttcagtaaaatagcccaaatattccatgtcagaaattgtacccggaaattcagacattacgctcttatcaaatctttttcctataccgtgaggaacaccgtttttggtttgtccgtaataagtaattccgtttcccaatacaagttcggttttattttcagcggtttcaaaagcattatccaattgatactttactgtgtttaatttagcaagacggctgttgtcgtcgtattcaacataaccatatttatttaaagccgaaagctgtatcagagttttaccgtctatattacaggcttcggtaagttcgccgcttaaataagtttttatatcggttgaatatacctctgcaattttggtgtataacggaatatcagactttaaaatgtttatttcatctttgctcagcgatgttcggtcaatgctgttgtttttctcgatactcaaagttctgagttcgttgttccaatccacatcaaagccgtaaccgcgcaaatcttccgcgcatatataggtatggtcctgataattgtatgacttgattggctgctcgtcaatcaacgctccgatatctgtagtgtagacgtcgccgttcttctcaaaggctgaaacaggagcgttaacacaactgcataatagaattgttaatataataactacggatattatttttttcatattcatcaccttataattaataataaaattattataacatataaaatactgatagtcaaaattgaaagctgtatacaaaaaagactgcggcataaaccacagtcttgatttttaaattaattgagcatacaataagccgagttctgtcaatgatgattatctatctcgaacgtgtgtcgccacacgcctctagccaccaatctccgaagatgccgggccggcttagccttcgattcaggtgttgctccgagtggggtttacagcattgataagtcgccatatcaatgggtgagctcttacctcgcctttccacccttacctgttaaaaacaggcggtatatttctgttgcactgtccttagagtcgcctccacaagccgttagcttgcactctgccctatggagctcggactttcctcacggccgattaggccacgcaaccatctggtatactcaataattaactgaataaattctgcgttttacagaagtgtaacctttataaccccgtcaatatcttcaatctcttttgcgatagccgggtcaattttgccctgaaggtcaagcattgtatatgcgtagtcaccgcggctcttgttgagcatggtgtctatattaactccttttgctgcaatcaggtcagtaatatgcttcagcatattaggaacgtttttgtgagccacagtcatgcgttcgccattcttttcgcccatgtcacagttaggatagtttacgctgtttttaatatttccgttttccaaaaagtcttttatctcattagaagccataacagcacaattttcttcactttcaggagtagaagcgccgagatgcggcatgcagataaccttgtcgttattgagaaggtcggccgtagcaaagtctgttacgtaacatgaaacagttccgtcctctaaagccgcctgaatatcggttgtatcaaccaaggtgtcacgtgagaaattaagcagtcttgcaccctttttcatttttgcaaaagcctcggaattaaacatgccaattgttgacggcaaagccggaacgtggatagtaatataatccgactgagccaaaaggtcgtcaaagctggttgccttttcagcaaatctagtaaggtgccatgctgagtcaaccgagagataagggtcgtagcccacaacattcattcccaggtggtgagctgcgtttgcaaccttaacgccgattgcgccgagacctacaactccgagagtttttccgtaaatttcaggaccgacaaagtttgacttgcctttctcaaccaaagaagcggcttgatctccttcatcttttaatgtctttgcccagttgataccctgaacaacttttcttgaggacaggaggagcgagcagataacaagctctttaacagcgtttgcgttagctccgggagtgttgaaaacaacaatacccttttcgctgcacttatcaagagggatattattaactccggcgccggctctggcaacagccctcaggctttccggaagctccatatcgtgcatcttaaaacttcttaagatgataccgtcaggattttcacagtcgtcagaaatttcataattctttccaaggattccgagacccttttttgagattttgtttaatgttttaattttatacattatgaattctccttttcaaacttagtcataaagtcaaccaatgccttaacgccttcgataggcattgcgttatatatgctggctctcatgccgccaactgttctgtgacctttaagattaacgaagccctgtgcctttgattctgaaacaaattttgcattaagctcatcagaatcagtaacaaacggaacattcatcaaagaacggtcttttggaacaacagtacctctgaacatctttgagttgtcaaggaagtcataaagaatctttgccttttcaacattcttttcgtgcataaccttaacgccgcccatgtcttttatccattcatataccagaccgcaaatataaatagcgtatgtcggcggagtgttaaacatagagccgtttttagcgtgtgtttcataattaagcattgtaggagtgatgtccatagcgtttccgattaagtcgtcacgtacgacaacaacggtaacaccggcaggacccatgtttttctgagcgcccgcatacacaagaccaaacttgttaaagtcaacttcttcagataaaatacatgaagacatatcagtaacgattgtggcgtctccaaagtcgggaagcgtgttatagtgggtgccgtaaatagtgttattataagttatatgtacataatccgcgccgggagtaagcatacttttgtcaacatccggcaggtaagaaaatgtcttgtcagcgcttgaagcaatttcattggctgtaatatagcgttttgcttcagccagcgctttctttgcccactgtccggttgtcacataatcagcgaccttagacttgtttccgagattcataggaaccatggcgaactgtgttgacgcgccgccctgtaagaacaatactttgtaattgtcaggtatattcatgatttcacggaaagtagcttctgctttgtcaatgatagcttgatattcgccgctgcggtggctcatctccataacggactgaccgcttccccccatatcaagcatttcttcctgggcttttttcagcacatccagcggaagcattgacgggcctgctgaaaagttgtaaactctactcatttttttctcctccacaatatatatattcttttattatttttatattaatatttcataaattattatttggtcataggtttcaccatataattatatttataaacctcaacatctattctaagtaaaacttaactaaataattaactattacattatataactaaaaatttaaatcgtcaatatgaattcgcaatttttttaacaatccgacaattttcatcaataagccttaaacggcttccgtactggtcgtataatcaggcggtttaacagccgcaatattattgacattgaaatactaaaatgttatacttgacagtaattaacggttgacaataagggtgatgaatatggcggaaataaatggttttgtgcatttgcatacgcatacggcctacagccttttggacggagaaggcacggttgaaaaggtgcttgaccgagctaaagagcttggacaggaagcaatggcaataactgaccatggaaatatgtatggtgttattgagttttacgagtatgcaaaaaaaattggggtaaagcctattttgggctgtgaggtttatgttgccgccagaactaggtttgacaaaacctatgagcttgattcggagcggtatcatcttattttacttgccgaaagtaacaccggttataaaaatttgatgaaaattgtgtctatgggttttatagatggattttattataagcccagaatagatatggagctgctgagagagtacagcgaaggaattatagctcttagcggctgtatgtttggagtgctttcgagaaagattcttgccggcaattatggagcggctatagagacagcgaaagagtttattgatatttttggcagagatagattttttgttgaggttcaggaccatggtctttatgatcagaaaaaacttaatgtcggcttgataaaacttgccggagaactggagcttgacatagtctgcactaatgatattcattatgtgaaaaaagaagacgccgagtatcaggacgtgttaatgtgcgttcagatgggaaaaacagtcgatgatgataaacggatgaagatgtctacttctgaactttatgttaagtcagaggatgagatgaacgaactgttttcatacattcctaaagcaatacaaaacactgctgaaattgctgagagatgcaatgtggagatagagtttggaaaactgcatttacctgagtttgatgtgcccgagggttatagcgcgtatgaatatttaacaaaattatgtctggacggatataagaaaagatatccaaaagaggcagcagatagagacagtcaggtatacagacggcttgaatatgaacttgagactattaaaacaatgggctatgtagattattttctgatagtctgggactttataaaatacgcaagagataatgatataatggtaggccccggaagaggaagcgccgcaggaagcgttgtggcttactgccttgaaataactaacgttgacccgattaaatatgatttgatttttgaacggtttttgaatcccgaaagggtcagtatgccggatattgatattgacttctgctatgagcggagacaggaagtgattgactatgtcaaccgcaagtacggaagcgacagagtgtgtcagataataacgttcggaactttggcggcaaggcaggctatcagagatgttgggcgtgctctgaatatgtcgtatgcgtccgtggacagcgttgctaagcaaataccgtttgaactgcatatgaccttgaaaaaggcgcttatcttaaatccaaagctaaagcagatgtatgacggcgacgaaagtataaaaaagcttatcgacactgcaaaggcgcttgagggtctgccgagacatgcgtccacccatgcggcgggcgtggttattacaaaggagccggtgtataattatgttccgcttcaaaaaaatgaagatgttataacaacacagtttacgatgacaactattgagagactgggactgctgaaaatggattttttgggtctcaggacgttgactgtaatacgtgacgcagctgatatggctgaaaaatcatatgggataaaactgaatatgaactctgttccgctggacgacgaagaggtctataaaatgatttcaaaaggtgacagcgatggggtgttccagcttgaaagcacaggaatgaagcggtttatgaccgaacttaaacccacaaatcttgaggatattatcgccgggatttctctttaccgtccgggacctatggagtctattccgcggtatgtcgataataaaaacaatcatggcagtgtcacctataaacatccaatgcttgagcctatactaaacgtaacttatggctgtatagtttatcaggagcaggttatgcagattgttagggagcttggcggatattcgctgggcagagcggatttggttcgacgggctatgtctaagaaaaaagctgatgttatggctgaggagaagcataacttcgtttatgggattgatgacggtgaaagcaaggttgacggagctataaagcgtggaatagatgaggagacggcagtttctatctttgatgagatgatggattttgcgtcatatgcttttaataagtcccacgccgcggcatatgcagttgtggcatatcagaccgcctggctgaaatgtcattatccggctgaattttttgcagcccttatgaattcgtttattgacagcggcgacagaatagctaaatatatactgatagcaaaaaagaacggtcttgatataattcctccggatataaacaaaagcggaagaaaatttaccgttgtcaacggaagtatagtttttggtttgggagcaataaaaaacgttggcgatggggttgtggctgctatagagtcagagcgtctaatgaacggagagtttggctcttttactgatttttgccgcagaatgtcagggaagaagctgaataaaagagtggttgagaatcttatacaaagcggagcctttgacagtttgaagataaaaagaagcgttttgttatatgaatatgagacactgatagacaagctggcggcgtctgcaaagaatgagcttcccggtcagataagtctgtttgatatagaaagcgaagaagacgggcaggaagaaactgttgaggcagataattttgaggatagacatgaactgcctatagaacagctgctagccatggaaaaagagagtatcggtatgtatgtgtccgggcatcctcttgacgaatacagggagtttcagttcagcggcagagtatcgccaatattaaatattttggaggatgaagagcataaatttcttcccggaagtcagaccgcagtgtttggtattataacaagcgtcagagttaggcggacaaagcggaatgatataatgaagtatattgttattgaggatttgacaggaagtattgaatgtttggtttttccgaccctggtgcaaaagtatgacgacatgttggataaggacagtaaaattattgtcagaggagatttggatataagtgaagactcggcgcctaaagtcagggttcagagtattgaaagactgcttccggcggaaaatttgaaagagagaaaatacagtgaaagcaagttatatataaaattaaaatcaaacgacagacaagctcttggtgatgttaaaaatatactgtcaggcacgggcggcaatattgaagttataatatattttgaagatacaaaaaagacgttaaaggcgccggacagtatgaaggtgagtcctgaaagcgaaaagataagaatacttaaaaatatgctcggcgaagataacgtgaagcttgtaaataagtcataaatgtaaaatctatctatatgaactaaggtgaaaattttggaaaaaagaaatacaaaagcagaggttcttgaaatacttttaaattctggagaaacgcccgtatcaggggaacgtttggcggaaaatttgggaatatcaagaaatgcggtttggaaagctgtgaccgctcttaaagaagagggatataatatatccgcaaaaaggaactcaggttatattttgaataaaagcaatgtgctgtcggtaattgaaataaaaaaacacttaaataatcctaagattgctgatagtatagaaattcaccgattggtcagctcgactaataacgtagctaaagaatatgctttaaatgataaaactactgatgtgcgtatatttatttctgaggagcagagcggaggaaaagggagacggggcagaagtttttattcgcctcctggatcaggcatatatataagcttcctgtttcaccctcagataaaggctgtagacgccgtacggcttacaactgtcacatcggttgcggtatcgaaggctatagaaaaatccactgggctggaacctcagataaaatgggtaaatgatgtgttttttaatggcaaaaaaatatgcggcatattgaccgaagcgctgaccgaccttgagacaggtatggtagacagcgtgattattggcataggagttaatgtgtttggcggcggatttcctgaggagctcgccaaagtcgcaggagccttgtctgattctgaggactgcacggacattgacagaaatgtgattgccgccgaaattattaatcagatgttggattttgtccgttgtgacgacggtgattgtgtaatcaaagattatattgaagattataaaagtcgttctatggtacttggtgaaagaataaaaatattaaacacgggagagtttgcattagttcaagatataaacgaaagcggtgctttggttctaaagctggacagcagcgaaaccaggattttggacagcggagaagtaagtataagggtcagcggaacagaaaaatgaggttattttatgaagaaaatcggaacggcagtattgttatttttggttttgctcgcttgttttcctatttgcggatacgcgatagagtttgatatggatgagatatgcgattctgtagtggttgttcactctatgaattcagttggaacagggtttgctatctcaaaggataagatagtgacaaaccagcatgttgtgagtactacaacaacttatacaatcgagacaagggacggaggtttgtacaacggccggcttatagcttctgatgaggctaaagacttgagcctgatagaggttttgggaggcaatcttccgacaatacctatgactgaggatattccgcctttgggcaccgacgtatacgctgtaggctctccgcagggaatgggatttacggtaagccgaggtatcttatcaacaacagacaggcagttaaacggagtgcattatattcagacagacgcggctataaatcccggaaacagcggtggtcctctgctcaatcaaaaaggtcaggttattggtgtcaataatatgaaggttgaagacgctgaccgtatatctctggcgatacccatgagttcagttgtgacgtttttggagaacaacggaataaacgttcagctttctgatactcctgacgctgagcttgaggctccgggcagtgtagtgatacaaagttctgccgtatcgggcgggattgaacagtcatatgaacagtattcaaacagtttgagaaatcagtatactaaaatattagagacggttcaaaatgaaaataaaatacttgttttaggactaattattattgcggttctttgttttgtatttatgcttgtcatgctttcacaaaaggaaaaattgaaacgttctgaggataactttaaaagagcgatagaagcgctgaaaaagcagggaatgcagatgaaaatgatgcagagaatcagatttacaaatcaaagtagagaaagtgaaaccggtacaaattcagcgtctgatagaaactgcggtgaatatcaaactgtacctgaaagccggagtgcgtttgtatcaagaatgccgagaaaacgttcggaggaacagcagaaaaagtatagaaagaggctgtattagaaattatgataaataaaggtcaaaaaaggtttttagaatgtgagagattgattatatttattggtctaatgggcgttggaggtttcctgggggcgtatacttactcaatccgcggcggagtgttctgcaatgctcaaacggctaattttgtattgctggctatggcgatcggaaaatgggatttgagcggtgcggcatatttgctgatacctatttctgcatattttttaggagccgtactctcagaggcgctgccgattcatgttaaaaagtttggtttggttcgctgggatactctgcttgtaggtatagaggttttagtaacatttatgcttggtctgcttcctgaaaccgctccatatcagataacgcaggtagctgtaaactttatctgttctatgcagtataatacgtttaggcaggcggagggaacgcctatgtcgacaactttctgtacaaaccatttaagacaggttggtataaattttgtcaaatggctgaggaagggaaagtcggatagtttgggcagaagtgttaagcatttgtgtatgttaggaacctttgtgctttttggtataatttctactgttttatgcagattattcttaggcaaagccatatggggagccacaataatcttgctaatcgtatttttggacctgcttcatgccgacttaacctgcgagcatgatttgcttagtgaaaaaccgttgggacattgattgttaacagtatgttcattgaaattttgttattaatgtgatattattattttgtttggtgatagagttagaaagagatggtgtgtatatgaatttatctgatgataataaaaatgagattgaatcttcgcaaatgagcggagttttagatgaggtcgatcagaataaaactgacagcgttcaaaatttatgcggtatagcaaaaaagacgtctataggcggacaggctgtgattgagggagttatgatgagaggtcccgaaaaaattgctactgcggtaaggaagcctgacggagaaatagttgttgatgaacagcctcttggaaaaggcagaaaaagcaagtttgtaaaattgcctattatccgtgggtgcgttaatttttttgactcaatgattgttggcgtaaaatcacttatgttttcggctaagttttttgacgtggatgacgatggaaacgaagtcgagcaggagccgggaaagtttgaggcctggctggagaaaaagctggattcagaaaaagcaatgaatgttataatctattgttctgttatcttttccatgtttttatcaataggtttgtttattttgctgccgacattgatagctggttttttgactgattttatgcaggtgcataataatacggttttgacccttatagagggtattgtaagaattgctatttttatagtttacttatcattggttgcacagatgaaagatataaaacgtgtgtttatgtatcatggtgcagaacataaatctatattttgctatgaaagcggactgccgctgacggttgataatgttcgtattcaatcaagactgcacccgcgctgcggcaccagctttttgctgatagttatggtgataagtatattggtgttttcaattataccgtggcagcaggaaagctttactcatatccctgtgattggtgtaatgttttcagctatgccgtgggcaatttggagacttatattgagactgctattactcccaatagtagccggaatttcttatgaaattataaagtttgcgggacggcatgacaattggtttacccgcgctataagcgctcctggaatgtggtttcagcttataactaccaatgagccagaggatgaccagatagaggttgctataaggtcgctgaaagctgtgataccggaggataagactgcggatgtgtggtaaaggctgactcacatagttaggcagaaggtgattttatgacattaaaggaattgcgcagaaacgcgcataatagattaaaagaacaacccaatatatcatctcccgagcttgatgcggatttgataattatgttcgttttggatttaaaaaaggatgaattattaactaaggatatatctgtgccggacgcgctggctatagaggtgaacgcgtatttgaaccgcagactggcaggtatgccggtgcagtatatagttggaaaaactgagtttatgtcccttgattttatcgttaacaaaaatgttttgataccgagacaggatacagagattttagtagaaacagtgattgagagatataagaacgtatctgagcaaatcaggattttggatataggaagcggcagcggatgtgttggaatcagtatggcaagatatttgccaaactccgttgtgacagaacttgatatatcagaagaggcgcttaaagttgctgagctgaatgctgaaaaaaatttggtgacaaagcaaatgaattttgtctgccgtgatatttgtgatggaatttcggatttagagccaaaatttgatgtgatagtttcaaatccgccgtatattaagacggatgatttacttgagcttcagcaggaggttatagaatacgagcctgttgccgcattagacggcggagatgacggtcttgatttttaccgtattataattaaaaaagcagttcctaaaaaaggcggaatgacagcgtttgaagttggtataggtcaagccggtgacgtcgccggtttaatgtttaaggcgggatataggaatatagatattattcctgatttagccggaatagaacgggtagttttgggatatgcggcttaaaaatacgtgttaaaataatatttagcaatgattatattatgaaaatttttaaaaaagtatttgctatttagcatgattcggtttcgtctaataatatgggcggaaccgttttttgttatgtagaaaattattacgaaactgtctctgtaatttttagttataagcaacatctaaacgttgtctataattaaaaaagattttgagaaacgtttctgccaacagatataaaattaatgaaaagtaaaaaggccccgagagacttagcacgataatatcagaaaaattgttaaacttattttggaaaataaaaaaatttagtggaaatttacagtaatcaacagttgtgataatgtgatgttattatagcaaagaaaccgatattgtgaaaattattgtaaacgacagtaaaaaagttgaaaagagagaaaatataaaacactgcaggtaataattgtgaaaattgtaggtttttattaaaaattaaaacggttttaaaaaataatatagaattgatatttaataaatgcgttgatgtcaaattaaaaagggttcgattgaaccctttttaattaataagtttaaaattatttgaattttttataggaaagtataaattacaatatatctactaaatccaatgattttaagaaatgtagcatttaccttaaatcaataaagctgtcttccgtttcaatcaatgattagaatactatttcattttatttttgtaataactgagcaatcgatttagtattgcttctcaaatatctggataaacaatataatgaatccgggttaccttgtgttatatagttatctttttgaagacagctaagagtggctctgtatcccagctcttttaatatcgcctcggaatttttgcacatctcaccgtatggataagcatatgtcactggtgtgatgtcgcagttatcttttagcagctgttggtttttttctgtgtcggctataaatttttccctgtatgtttcgtcagactcgccgtttttttgccccacgccttttctgttgtctttattgtttttatcacccggaagcatgtgcatattatagctgtgattgcctatttcaagcctgtcgttgtccacaagctcttttatattgtcccaggtaagatacgcatattcaggattgctgtcgtcaatactggaaaacttttcagcatattgaccgacgattgaaacgaccgccttcatatcatatttttcaagaagaggaagaccgtattctaaattattttcaaacccatcgtcaaaagttaaaactattggcttttcaggcaaagcttcattcccgtcgacgtaatttataacatcttccatcaaaacagtagtgtatccgttttctttcaaatattttaaatcttcttcaaatgaagagataggaataacgtaagcgtttactttagatgggttcttggtcaatccatggtacataattataggcagttcaactgatgtgcggtcatcttcagaaaaactttcggcgaaaccaaattgtgaatcattatttttcaaagatgagaatcccactattccgactacaactgaaataataaatataactgaaaaaaataccagcgtcttcagtctgacaacaaacataaaaaatcacctcatatatagatagtattagaggtgattgtattttattcagatttttaatgtcaaataatggaattttggacaaacgtattaaatattaatattttacttcatattcataaggagccatcagcggctgcatgttatcgtcccatataaatacccttattaatgagcgcaaacctgtcttatctacaggcagaacaagcgatggaagagtcttatgaccgcttgccggaatttcaacgtcgtttttaactattgaacctgtcacatgttcaaccaattcaccatcagcgtcgctggattccgtgtatgaaactacatagcagtctacaaatttatttttatcggtatcattataaagctgaatagaactctttaatgaatttaaatcagcgtcaaataccaaaggatatatttcggtgtgcaattcgggtgagcttacaggggcagaggtaggagccggggcaaaacttggacttaaagtttcaattatattttgtatattgagagctccgtatccatattcaggattcttgccgtcgtcgcctagatggtctgaagtttcagctattaattcaagaaattctgcgggggtaatatccttattaaaatattttgctattgctgcggccgcagtcacatgaggtgtagcgtatgatgtgccggtaccgcgggaataggaatgtatcagattgtttttaccgtctttagtcaaagaactgctgtaaatactttcaccgggagccataacatctacagaagtgttatattggctgtgtgaagccctctttttggaatatgtaagcgaaccaactccgattacattatcatagccggcaggatattttattttagtagctatttccgtttctttatttccgtcatttccgaccgcagcaactactatgatattttttgacacggcatgttcaatagcatatttaaaagattctatatagctgtcaaatgtcaggcttaagtttattacatcgcattcgtaaacatccacagcatcataaaaggctttaataactttagcgctgtcagtttttttctctgtaaacactttgaagggtataacagtggaatttggaagaataccggcagttcccataaggttatttgtgtcagaggctaatattccggatataaatgtcgagtgcccatatgtatcataaattccggttccggtgtagtcaactccgggcgcaatattttgagttatgtcaggatgtctgtcaggtgacccgctgtctattattcctattttaatgttttttgtatccaatccatattgccaccagtatggcgactttatcatttccatattccattgattataatagtatgtatcatttggctgagtgaatgaactgagactgtttaaaactgcaatatttgaattgtttgattcagaaagaacgttgatatcagttatttcctcgttgtccggcagcgagatgatataattaggctctatatactcaacgttttggtcttggatcaggctgtctataaactcttcggattcatttgtaactgtgtatatattctcatcttttactataggtgagagctgattgacgtcactttcttcagccagcattacgggagctgatttgaactttactatgtatccatcgtaagacgtgcagtcttctgcaaaacatacagtttgaaatacaattatcagcaggcatgtaagaacagccgaatataatattttgttaaaaaatattttcataagcaggcacctcaaaatttgtaaactttcttatgtatttgtaatattttgatgtaaaaccaattgcaaaaattataacatatatttttttcaaattcaattattttcataaatatataataggaaatttcggggaatttaggcttataaactattagattgagttttatttgccaacgaaagagaagatacacgaaccacactttcattggaggaaggatacttgatagcatcgactaaattaaaaaatttaaaacatggatagtcaacactaatttagacaacttatttaaggttagtaagccgatattctttcggggtcatatagcccagtgatgagtgaatcttgtgattgttaaaccagtttacataatccgataattcataataaccatttttgcaaagctccgccttgatttttcgggttccataattattccgactttgccggaattttcccgaatttctgttgtcaaaccattttattttggtatttgtggatactcatcactaatttaaatactcaaaaaataatttgtatactcaatgcaaacgtagtttgccgcgtaaggcgagcagctgcggaaaagtattatgacgaattgttaattttagaagaatgctgttgtattaaaacagaataatgaaaattatttattttctaataatataagaaataaaaaataggacttcattattatttgaagtcctatttttatgtactgtactatcacataatctacatctgttttttataacagcctatttctattgttcagtatgctgtttttatcgtataaatgtaattgtctttatagttttgcgtaatattaaaaatttattaatatattcccagctgtccaacgttattattaccgaatacccatatgttgttgtccttatctttagcgatagtaaaatcgaatccgccgtctatcttgacaatatttctcaaaccggcaataagagtgggagtaagagcggtattttgtattcctattccaagctgacctttgctgttgcttccgaaaccgtaggtgctttcaccgtcggtatagaagctgtggttatagccggcgcctatgactgcagcggtttttccggttgacgtcggaacgtttctgcttaccttatcacccaggcccagctgtcctacagagttgtatccccatgtaaacagctcgtctgatgtggatactgcgagcatatgactgttgccggcagtaatgtccttatagctgcccgtgattgcggtgggtgttgaagtgctgtcgttggttccgctgcccaactgtccgctttcattattgccccaggtgtaaactgtttcgcctgagagagccgccataaatttctctccgcatgtaacttttgatacgttgctgagacctgttaccggcgcaggaacgtttgctgcgcttgttccgcggtcacctaacttgccgtctgtgttgctgccccatgtccagagagttccgtcgctctttatagcggcactgaatccggtgcctgccgctatatccgttatattgttcaggcctgaaatttttgaaggcacatacactttgcctttatatgcaccatgaacttcaccgctggaattgttgccccagccccatacttctccgtttacatcaagagccagtacgtggtgtttgcctttggcaattttaacgatttcaggaagaccttcaactttcagcggcgtatattgattcagctttacctgtccctgacccaggtcatagtatgcgccgtctccccatacatagacttcgccgttatatgttaaaccgacagcggtttcacgttcagcggcaatgtctttaaatttcatggacataatttgtgacggaaataatagctgtgttatattttgcccattagtgtaagtgaaattattgagtttagatttataaaacatctgtccgtttttgtctgagaatacccggcaaatggggataaccgcgtatgtatcattatatacaaccgctggactgttgctgttattttcattgatgtaatcatacagctgatatgacgctgaaccgttgtagtcaacctttacggcaagatatttttcgctttttgcgttataatcgaagattccggcgacctcacggtatacgaaagttttgcccggcacagtatatttggtgtttttacaagttacatcaacgctttcaagggtaaattcacagctgggataatagatttcttcatccatccagtatttttcccattcaatttttgtttcccaccacgaatcttttccaggataaacgattccgtcatttggataatagatattgttttcaaaccaaagctgtgaaactataaggttatagtttgaatcatatttaaaatcaaagacaggaataagaattccgtcgttgttataaatcggtccttttgtttcgcggtctgcccatggcgcatatattccatactccgcagtgccgttgtttttaatttgcaccccgagagaatagtcccgctcaggtctgagaggcggagcagaaagtgccggtctcaaatttattgtttcggacggaacattgtaataattaccatttgcatatacttgtatgctgtcaattttaaaagcggcattcagattattatcagggtcataggttacgctgttattccaccaggtatagttaggaacaataagcttagcgctgtctgaaaacaattgtccgttttggtcggaataaacatctgcaatccaaataagcgcataatcatcaaaatatgcaatatctttgttatcctgccccatttcaagctggcggtctcccgggtcaagatagtattctgcggaaccgtcatagttaacttttgcgcagagctcgtatctgctgtttatctcatagtcataatttgcttcgataacatcatatttcaatgtttttgccgggacagtataagttttgtttttgcatataacgttaacgctttcaatgttaaatctgcacttttgaaaatacggttcattttcatctataccggtatattgtctccattctatggatgttgtccaccactcaagctttccgggattcacaaccccatcgtttgcggtcccgtccgccgttgaaagaaggtttgtcagatcaaggcggcctccgctggaaactttatcatattcggacgaagtgtatacagaagataagattatatcttttaattctgcgccccttaagctcggattatatccttttaacagggcggcagcccccgcaacacatggagcagccatagaagttccgcttaaatatttatattctccgccgggaacagtgctgtaaatacctgtgccgggagcggcaatatcgactgatacaacaccatagttggaggtgctgtttaaagaaccgctctcatcaaaattagctacagatattatgttttcacattcaaagccggatggataattcggaactacgtcagtgtcaactccttcatttccagcggcgaaaactaatagtcccgggaatctttcaatagctgttttttgggcaaggctgcttgaagttcctccgaaacttccgtttattatatcaaaatgattatctgtggcatagttaatggctttaataactgccgctgagctgattctcctttcatcaatccctacgttcagagcggcaatttttgttttccaggcaaccccggttacgccgattccattgtttccggcggcagcgatgatgccggccacatgtgagccgtgataggcaatatccattgggtcgttatgattgaaagtgaaattccagccgttaatatcgtctatatatccgttatgatcatcatcaacaccattgccgggaatctcgtcttcatttacccacatattgggagccaaatcaggatgattataatcaacgccgccgtcgataacgccgacaacaacatctgaacttccggtaaatttatcccatgctatcggtgcgtttattctttccattccccacagttcattgtaaaactcgtcgttaggtatggtatcatagaaatattgtatgtagtcgggttccgcccatagaacgtcttcatttgcttgaagctgcttaatggcgtcaaaaacaccttgttcggattgattatttaattcaataaggaatatatcaccgggcgagtctgctgtatcatcacttaaagtcattatttcgtcttcttcagacgcgggtgaaatcagctcaatatccgctatatcaatgttgtcaaaaatagagctgtttaatactgcggttttactatcaactgaaaacggcgctttatatttgccggcggaattttgtttcagagtgacaataactttgccgggcagaatatcatcacaggttccggcggaatccggcggaatctcatcatttaagccggcgttattgttttcttccagtatcgggctttccgcagttggaacagaaggatctgccgtctgaacggaagtttcggcagttaaaatattgtcttctgccgttggaattggggatttaccaatggagctatcaatggttgtttcttcctgcggaatagcttcttcagcaaaagagttaataggtaaaataacagtgctgagcagcagggctgccgctaaaagtaaacttagattctttcgtacttttttcatttgtacattctccttttaatttttattgataattcaaatattacaaaatattgtcaaatattgaattaccataaaaatcatatcatattattaatttaaatacaatgttgaattatagataaatatattaataaattattggtaaatattaataaaagtattatacaaaagtattatataatatgaaatgtgcgatgtgtttcatactattgcatataaaagtataaacgtaaatataaatatatatttataaaaaacgaataacggaagagtgttatacatcacgataaaatagatattgtaaaatattaatcaaaagagaaatattataagaaaagtgtatagaaattcatataagatatatactgcggctccgattataaaagttttgttgtaataaaataatactgtatgatttaataggtagaaaataatgtaataaaaataatttttatatttaaagaactaaaatttaaaggtgataaacaaattgaatttatgtatcaaaattttatccatattataataagacagattgttttaagttggcaaggctgggttaagcataatttctattatcttaatgctgcactatagccgtacctgaaacaacatcattttcgattatgatatcatatgtatatggatctatatagccgtctccaatatagtattctaatcttttgccgctgtaatatgaaacatttgacggatgaccaagaaaatcaattacttccgtttcggtttttccaaaaaactggtattgtttttcgagatcttcaatcatataaattctaagatttgcattgttatcccaattttgtctgctgtatgctgaaacagaatttttaactatattgtaagcccctgcgttaataagtgctgcagaaagaatgcaaaatatcaaaattaaaggtattgtccggcttatttttaatttttttctgaacaatatcggtaatataacagcgcatatatataaggtaaaaaatgaatatattaatattccgttttcaaaattttgaactatactattaaatcgaatgaaaacaaaagttgttaataaaataccgccgctgatgattattaataatataaatgataaatattttaatatttttgaattcatttttcacaccccgaaacaattatatcatatataaaaataaaatcaaataattgacgctattttaatatagcgtgcaggctgtgaattggacataagtgctttgacagtcttatatatacaaattaatacttattttttaaacaaaaatcttagaaaattaaagatagttttatgagaattaaaaataatctaagtataatcttagggcaataaaaaattttaaatggtttataaaataatcaaatatttcatattgcacgttttatatacagccattataaaaaataatcataatttaattataagtattacaattaaataaaaacgaaataaaagcggttaaagtgaacaacggtagtgcagatgaaatctgcatcgtgaggtgagccctgccctgccttgaaaaggcggtacgataattcacaataattcaccaatgtttaagcaaacatagacctttattgcacgtcttcatatataacgattcaaaaaatattatcaaatataataacccaaaattctaaataaaaatttataagaaaatatttttataaaaatcataaaaagccgcaaacagcgattaaatcagcgcttgcggcttttgtgtcgaatagaaataattggataaaacggttgttttggtgacaaaatggtaataaaacttcaaaataaattataacaacttattatagagttatatagagttattttttaaatacaaataaatattcgtgtgcaatcaataaaaaattatattttatactattggttttccaataccccgtggccttgcaattatgctgctcttttataataagttcttttaatttgaagcctgcattttcaaagatacgcattacatcaaaagacattggtatcatatgacctttttgtcttgtatctcccataagcacagcacaaaacttgtcctttttaagtatacgataactttctgttgcgacctttttcatttctttgagaaagtcttttacttttagttgtgataaatcttcctctatgccatcgctatacttgataatattagcatatggtgggtgagtgcatatcaagtcaatactgtcatcaggcaaaaaatcaagttttcttgcatcaccttttttgatatatacttttccctttgcagtcttgtaatcaaaagccgtcttttctctacatcgctggagtgcaacatcatttacatctactccaattatatcacgatttaatagttttgcttctacaagagtagtgccgcctccagcaaactgatctaaaaccaaatcgccctcttgggaatatcttaatataatatttcttggtatgtacggcgaccaattgccacgccatttcgcatcgtgagttgcccaatctccacgttgcggaaaagaccaatgtgttgtcatttcaagctcaaaatcttcaggctcccatttttttattttcttttccgccattatttaaaaacctcattgattataccattttctaaatctttgatgttataaatatactccataacatcaaaagtttcttcaagattgtttcttgcacttgtccaaccttttccgtctgtaaaccaaacaaatgtaaaaccgtttattgtatcggcttccatagcaagtgttttgtaacttcgagctgtttcatttagtttagaaccgttactaccataaaaattagtttctataccataaatcatattttctgttttgataacgaaatcgaagcgtttttccatctttccctgatttgaaatagctgataagtcaatattccatttttcagtaatttgatggatatatatttccttgaaatatgttttatctttagtaaaaccggctttctttataaagctctcgatcaagttttccatcaaatgaccaccacgattttttctgccattggagtcaagtccagtttcaactcctgttacataatcaacaatgttatttataatatgattagccattaaatcaaacaatcctgttttacgcataaatactttatactgttctgccgacatatttggtttcttaaacttatatgtaaattctccgtcactgtcaatagcataaatttcatttgatctaaccgctaaaagtaacggaatacattttaatatttcgggatatttttcaattaacgcttcaaaatcagcttcgatattctttgagcctataagggagtttaatatattaagctcaacttttatactctcaacatttctgtgtaccttttcaaaatcaatatagtatttataatctgcaatactatcacgaaaatcggataaccaagttgtaaaatctctgtttctcatattagaaactccttaaaaatttgatattaatagttcttttatttttcctcttgatttgccattacaatttatcatacgagtagcttcaactcttttaattgtatgtgcagagtaaatgttgtcaaaaaaatcgtcatctgtattagtatttttgggatctgaattactcacaacgattttagcaccttttttgtgcatacacttcacaaattcagcaagctgaatttgtgcttcgtcattaaataaattttctgtatatgccgtaaaacttgccgtttcggttaaaggtctgtatggaggatcaaaatatacaaaagtatgcttatctataaattcagcggactttcgataatctccgcatataattcttacattttgcagtttttccgatactgtacgaagatttttttcatcacagataaggggatttttatacgctcccataggtacattaaaaagtccttttttattaaccctgtagagtccattgaagcaagttttattaagaaatatcatcaatgctgctttttcgatattttcatcttcactgccatttattttcaaatcgttaaatttttctctttttgatatatagtatgactttctattttcagtttcaagaggcacatattcgctttgatatttattaagaaactctagcagttctttaatatgctctcttataataacataagtatttattagttccgtatttatatcactgatatatatttcacttaaattgtatttgcttaaaatatcaaaaagcaccgcaccgccacctacaaatggttcggcgtattttgtaataacaccattatcaaaaggataataactttctatttcttttaacaactgccctttgccgcctgcccatttaagaaaaggcttaacatttttctcatttgttttattattatatcttgcgcttctttcatcaacaggcttttcagcatttattggtataagccacatgttgcctaacatttgcacattttttattctattttcagagcaaagaacagccactcgtctttgagatataccccacttatcggcggcttcttttgcagacataacttccatatctagacactccttgtttattataaataatattatattctaaaactagaacaaaagcaatattgtttttgcgttttctcagttttgtacaaaaatataaattttatttaatagcaagcacagcaaatgagtacccgtttgcgaaaaatatgttttgcacaaaaagaacagataagtcaagagcgggcgtagcttgtatatttactcttgacttatctgttctttcattcaatatgtcagttgagggggaattaattccttactttgacttaatcccctttattccaaaattcagtttaaaatgtttaattttgataaaatgttaattcatatttaatttatttttttgtgtcttaaaattaaaaaatcatcaaaaacgcacatttatacagcatatttttagaagtatagtctttttgctttttatataaatttgattacaaataaaatgttttttatatctgtcatggtgataaaatggtgacaagcattacaaaatcaatttatataaacttataacaaaaaaattatattatttttaaaaacctttattttacgctattttaaacaatatcatataataacttataaaaagtaatattaaattatgggtcataaaaaaatatttaaaacgaaataaaagcggttaaagcgaacaacggcagtgcagatgaaatctgcatcgggaggtgagccctgccccgccttgaaaaggcggtacgataattcacaataattcaccaatacctaaatcaatataaactgttatcgcacatcttacagaagagtgtcaagccttaccacgattgaccaaatactttaactttcaatatacactatttaaaactttgaataaagtcacgaaaattataatatactgctttttcaagaaatgttatagaatgattatgattaaaactctttagatgtataagctttttttctgattcttcattatcaagccctgtaacctccataagttttttctgagtattaatgtttgtatcatacaaaacgcagtcgggcgccagcaaggctgaagcaaaaatgttagcgaacatttccatgtcgcttggctcagctttatcactgcggttccaaactgtgacgccgtccatacatgctaaattttctgtttcaaggtgccccatagctatatgtccaagttcatgcgaaattgttaaatgacgtctttctgttttatcggaattaaaaaaagtataatatgaatcattgattattgctgtaaaaccgtcgttaatcataaaattttcaagacgcaggctaactattaaattttcaaatattttatagctgccgagccgaactttcattaaactgcaaagtcgtgatatattgataggcagtttagaaattttataacggtataaaatttcaagagctttttgatatgcagttcttttattatcataataatcaaagtatttgtccactgataacacctcataggttattatcagctttcatacattaattattactttgtttaaggatttaaagtattaaaatttttcaggtgatataaattcttgtatagattctgtctgccagttagttttaaggcggctgacaaaaggtgaaaattgttcgcgaacttttatttccagcggctgtttataaaacatattccgtttgtataattcttcaatccgctgagcgcgtttttctgcataaatatatggcagacggcacacttccataatttcttcaggagtgtggaggttgagttctttaagaacacatgcgggagacattatgcggattgcaaacatatccgcttctttttcaagctgagaattcatattctttttgtttgtgtaaagaattttaccgttattgctttcaatcctcgttttatgccccaataagatatgtgcaagctcgtgaagaataacaaaatttatatttgcatacgaacggtaatcgtttttgtaaaatataaaccagtttttgtcgaataacatacaaaaaccctcttcatcaacagttcgtccttgctgaccgattattgagattatctccggaagttcttcatatgacttaatttgtatgtttagctgttcgcagattttaaaaacatcaattggcagctcgcatatattgaagtcaatcagaaacttccatgaagcattacgaacatttctgtatagaccataagaattattcattttttgcaccgtcatttttgtcaaactgttcaggcatagccagtctcagcatttctctgactctttgcagctgttcggaagtcaggtcgattttttcattgtttccttcaaagctgaatattaatccgttgtcattttttgactcggaagactcagaggcgggaggttctgactttccaagcagataatcggtagtgacgttaaaatactccgcaagtctttttatattatctaaattaggttcggtatttccattttcatatttgacataagttgttctgtcgacaccaagaaaatcggcgacttccttctgtgttttcttcatagaaattctcaattcttttaacacggtcatttttatcacctctaccctattataagtgaatattaatcacctttcaaggcggtgtgcaataaatccacttatttccaaaaaaactattgacaagtgcaaaaatttcacttataataagggtgtgaataaattgcacgatagaggtgataaatttgaacagtataaaatcttttagagaaaagctgggtttaacgcagcaggaacttgccgacgctctttcaatagaaagatctactgttacaaaatgggagaccggcatggcaatgccgcgggcgagtaaactcccggatattgctgaaattttgcattgtcaaatcaatgacttatatgttacaatagaagaagcgaaagataaagcaggtgcgtgacagtggatttggatgtttttattgaacccagtgaagacggggaaagtgcttaaaagttgatttcagtgaaattgataaagctgttgaaagactgaaccatatgcaggagagtatttcagaagctaaagccgctgcggaagaacttaaacagcttcttgaggatattaaattcgtgactgtgtctgttagcaaagaagacagtagaaaagataacagttaagtatagaataaatcggaagtgaaaatagttcagcagccaataagaagctgagttattcacttgtctttttatattaagccggccgcagtttttcggtttaaaagatttgattagttcacagtatatttttattatgtatatatatttcttgactcaatatatataacttttttacacaattatatttgtgcagacgtccttttggggcgttcgtaaagggatgtgcggaatccgcacacccctttttgctatagttttatttagtcaatttttaaaaagagtatatataaaatagggatagtttcattaaacagttgtcttaaaaatattgctaattaaatatattaacaatacttaaaatgagtaatgaaatttgctgtccattttattgtctgttttctatgtatattcacgcttcgcgtgagatggtagtcacctaacgcggtgtgcaagtaaatatatcacaactaagcaatttattatatgacacctaagttaattattggcgtttatagtttatatggcattatatggtttatataacatacacttttaaacaaaagtgtagccgcaatttacattgaaggtttatcaaaacaagttattttgtattacacccaccattatggtggggtcacagacattcaaggttaaaataaaacaagtcgttttgtataacgcccaccattcaggtggagtcgcaccctattgacgttcactaagacgcccctttattttttatattgaattttaattttacaaaaacaagttgctttgtataatacactctttacaagtgtggtaatagttacatttcagatgcttgttatattatattttatataatttttttattttaaactcccataattttttcgtccaattcattgtagcctatccacacctttaattttttgtctagttctttgttgaatttccaaattaaatattatgcctgtattaaatgtacacgcaatataatataataaatctttgttctttatattttctttaattgagtttctaaactatagcattttacgttgtctatatattagtaatttgatataatttataaatactacagagaaaaaaacggaaaattttattcaataactattgtgcggcaagaagattagtgttataattgttgccaggttcaatataaatatattatatcaaaaaattgccttgtttggcataatggagtatgtttatgggaattattaagttaatcaagaatgaaatacatttgacttttgaacgtgaccctgcggctcgttccaaagctcaaatattttttctttatcccggagttaaggcgattatataccatagaattgcacataagctgtatggtatgggaagatattttttagctgactgggtatctatgcacgccagaaaagttaccggtattgagattcatcccgccgcccaaataggtaagaatgtgtttattgaccatggtatgggtgtggtgattggagaaactgctgttgtcggtgataactgtaccatatatcagggtgttactctgggaggaaccggtaaggacaaaggaaaacgtcatccaacgataggtaataatgttacaataggcagcggcgctaagattttaggaccatttaccgttggggataattcaaaagttgccgcaaatgcggtggttctcaacgagataccgccgaacagcacatgtgttggcgttccggcgcatattgtaaaaagagaaggagttaaaattgctcctgcaaagcaggtttatgtcgcagacctagaccaaattcattttcccgatccggtatctatggacttgtgcagtttgagaaattctatagagcgtttgtataggaaagttgagaatattgagtgcggtgattataaagaagatgaaaccgattgattggatataataaattagatgaaagggttttctacatatgaaattatttaatacgcttactagagaaaaagaggaatttgttcctataaaaccgggggaggttaagatgtattcctgcggtccgacggtttataactatttccatataggaaacgcgcgtccgtttataatatttgatacgttaagacgttatttggagtatcagggatttaaggttagattcgttcagaattttactgatatagacgataagatgataaacaaagccaatgagcttggcatcactgttaaagaactggctgataaatatatagaagagtattttattgatgcaaagggactgggcattcatcatgcgacggttcatccgagggctactgaaaatattgacgctataatagatataattcaaaaactggttgacagtggttatgcttataatgttgacggtgacgtctattacagcacaaagaagtttaaatcatatggaaaactatcgcaccagccgcttgaggatttggagagcggagcaagaatagaagttaatgaggataagcgcgaacctatggattttgctctttggaagaagcaaaaacccggagaacccgcatgggaaagtccgtgggggatgggacgcccgggatggcatattgagtgcagcgctatggctaataagtatcttgataagactattgatattcacagcggaggtcaggaccttattttcccgcatcatgaaaatgaaattgcccagagcgaggcggcaaactgctgtcagtttgcgaattattgggttcataacggttatataaacgttgacaatagaaagatgtctaagtcgttgggcaacttttttactgttcgtgacgttgccaaagaatttgattatgaagttattcgtttctttatgctttcagcgcattacagaagtccgataaacttcagtaaagatttaatggaatcggcaagctctgctctagagagaatttatacatgtatagacacattaaaattcttaaagaagacagcaagcggagaagacgcgagaccggaagagattcccgtgcttgaagcggtcaatggttataagcagaaatttatagacgctatggatgatgatttaaatacagcggacgctatatcagttatatttgagatagtgtcggaagtaaacaaaaatattacctccgcttctgagccgagcgaatatcttatagaatatatattgtcagtttttgatgagcttggcagcgttttaggaatacttgggcgcaaagagaaggaaacggttccggatgaagtaaaagagatgcttgaggaaagaaaaaatgcgagagccgataaagattgggcaaagtctgatttaatcagggataagctgaaagactttggctattcagttaaggatacagctcaggggcagcagttgattaagctatagttaatttaaattaccgcttttagaaagtttaaataaattagtttcataataaaatcggatttgctgttttaagctaaatgatagaatagctgtgcggtaaaacctgtttgattaattaaatattattatatccgcctctttttgaggcggtatttgttaaaataagaaattaaaatacgatttggaggaaccatctcttattagggatacagagtgagatatacgtgaataagttttgtaatatagcacaaaatattattacgtctcggtttgtaaaaattaaaagatatgataaatgttattttagagaatttgggtatagataagctgccgccggagcagtattcgccattaaccttagcttatttgggtgatagtatatatgagttatatgttaggagctatttggttaaggatggaaatgagaatgtaaacaagcttcataaatcagctacaacatatgtttgctgcaagggacaggcggagtttttcaggaaaatagaaaatatgctgtcagaaaaagaaatgtcagtgtttaagcgcggaagaaatacaaaatcacatgttccgaaaaattctgaaatgtcggattaccgtgtggcaaccggagtagaagcgctgtttggttttctttatctttcgggagaagaagagcggatatgcgaattacttaaacatatttttgattaatagatttgcctgtttgtttttatagcgcaatgaacaatttgcgtagaattttacataacaataatattaaagcaattattataaaacaaatggggcggtataattgaaagaaaaagttcaggatatattgttaatattgcttggcggaagtattatgggttttgctctggatttttttcttgttccgtctcaggtcactgccggaggtgtcagcggtgtatcaacagtattgtattatttgtttaacctgcctattggattaatggtattggttctcaatattcctatttttattttagggtttataacatttaattctagatttttaatcacttctctgataggaacagttgcgctttcagtatcagctcaattttttgaacttgaaatattcaggagctttcagccaatatcaaatgatatgctgctctgttcggtattcggcggctcaatatatggcgttggtcttggtatagctatgcgttcgggcggtacaactggcggtacggatatactttctcttgtgctgaaaaaatggtttccgtcaatgtctgtaggtcaatttattatagctattgacggtatagtaatattggcggcaggattggcgtttcagagattagacacgattttgtattcaatagttatgctgtttgtttgctcgtatgttttagatacaatgctcgagggcgtaaattttgcaaagattgtgtacgttatttctgaccataataaggaaatagccgaaatgattgcgtctgaacttaaccgcggttcaacggcgctttccggattttcaatgtacagcggaaaaaacagagacgttttaatgtgtgtaatgagaaaatatcagcttccgccgttgaaaaaaatggttatgaatatagacgaaggcgccttcgtgattgtaactgacgcaaaggaagtaataggacaaggctttaggataaggaacaaattgatataatttaaaattataaaatcctgtgacttgttatgcgggattttattgtgctattatacatcttgaatctaaaagttttttgggttataatatcaaatatataatttaactttataaaggtgaaaaaatggaaaaaacagaagctaaacagcgtattgacgaactgaaagaaatactgaatgaagcgaacagaagttattatattctagacgctcctgaaatcagtgactttgaatatgataagctcatacgagagcttattgtattggaggaagaatatccggagtataaaactcaggattcacccagtcagagagtgggcggcggcgtgcttgagggatttgaacaggttactcacgccattcagatgcaaagccttactgatgtgtttgataaagaggaactttttgattttgacaatagaacaaagttatctctcggtttagatactgttgaatatgtaacagagcttaaaatagacgggctttcggtttctttggaatatagggatggaatgttttttcggggttctacccgaggcgacggaaatattggcgaggatataactaataacctcaggacaataaaaagtatccctctaaagctgacggaacaaattccatatttagaggtaaggggagaggtgtttatgccaaaacccgcgttccttcgtttaaatgagttgagggaagtggcggaggagccgcttttcgcaaacccgagaaacgccgccgccggttcgctcagacaattggacagcagtgttacggcgcagagaagccttgatatttttatttttaacgtacaggctgttgagggaatggagtttgtcactcacagcgaaagtcttgattatatgcggaaattgggatttaaagttattcctgacaggcggattcagcacgggattgacgaggtctatgatgaaataatgaggcttggtgaaatgcgcggcaatttagactttgaaattgacggagcggttgtaaaagtaaacagtttggaagagcgtttgttacttgggtcaaattctaaaacgccaaaatgggcaacagcttataaatatcctcctgagcgccaggaaactgagttgattgatatagtgcttcaagttgggagaaccggagcggtgacgcctaacgctgtttttaaacctgtgagggttgctggttcgttggtatcaagggctactcttcataatatagattttattcattcaaaggatataagaataggcgaccatataataattcaaaaagccggagacgttatacctgaggtcgttgaggttataaaagataagaggaagcctgacgctgccaaatatgagatgccggatgactgtccggtttgcggcgaacctcttgagagaatagatgatgaagcggctactagatgtacgaattcaaactgtccggcacagcagcttagaagcataattcactttgcctctaagggagctatggaaattgacggcttaggtccggcaatagttgagaagcttattgatgagggtttggttaagacctgtgctgatttgtatgaactaaaaaaagacgatatagtaagtttggagggattcgctgagaaatccgcttcaaatcttatagagtctatcgaaaactccaaatccaggggccttgacagacttttgtttgcgttgggaataaggcttattggttccagagctgcaaagctgatagcagaacgttttggcaccatagaaagtgtagctgaagcaaacgccgagcaaattgcagaaatccctgatataggtgaaaaaatggccgggagtgtagagcattatttttctgaatctgcaagtattgagttaattgaacatctgcgcaaatgcggggtggatatgacttatgaagcagtggaaaaaggcggtatattttcaggaaaaacgtttgtaataaccggcaccttgccgggaatgaaacgcagcgaggcaaagaaacttattgaggacaacggaggtaaagtatcgtcaagcgtatcaaaaaagacagactaccttttggcaggagacgaagccggcagtaagctagacaaggcaaataagctgggaataaatgttatatctgaagaagatttggaaaaaatgcttgacaacaatttctaattgtgttattataacctgcggtaacctatggcttaagttttgggatatggattcaccgccctctactaagctttaaggggctaatataatatggaggtgacacaacatggataaggacataaagcaggagattattgaaaaatacgctacacacccgggcgacactggttcgcctgaagttcagattgctcttcttacacaaagaattaatcacttaaatgagcatttgaagattcataagaaggaccatcattcaagacgtggtctgcttaaaatggtcggtgttagacgtagcttcttgaagtatcttgaaaagaaagatattacaagataccgtgctatcgttgaaaagcttggcttgagacattaaaaacaattgacggcagcctgcgcatttttcagcgtgggttgcctttggtttattttgtaaacaaagagttgagctcactttagcagttaaaaatatgcattggcgctgataatgcctgtttttaagtgctaaacgggcctctcttttaaaatatttaggaggtttatttatgtcaaagatttatgaaacagaagttgccggaagacccctttctttggagtttggcaaggttgctggactggctaacggttcggtaatagtaagatacggagacacagttgttatttcatgtgctactgcgtcagacaagccgagggatggtattgatttcttccctctcagcattgattatgaagaaaaaatgtatgctgtcggaaaaattccgggaggatttaacagacgtgaaggaaagccgtcagaccacgctatattgacgtcgcgtgttatagacagacctatgcgtcctttgtttccaaaggatttgagaaacgatgtttctattgtttcaacagttgtttcggttgaccaagataattcgccggaattctgtgctatgataggttcatctatagctgtcagcgtttcagatattccgtttaacggtcctgttgccgctgtatatgtcggaatgatagacggtgagtttattatcaacccgactgttgagcagagggaagcaagcgatcttaaccttgttgtttcaggaagcgctaagaaagttgttatgatagaggccggagccaatgaggtttctgagactgatatgtataacgctattatgtttgctcatgaagaaatcaagaagatttgtgcctttttgcaaaagatagttgacgaaatcggaaagccgaaatttgaatatgagcatgttacagttgatcaggctttgtttgatgatataagagactatgcagaggagcaggttaaacaggcgcttgacacggatgataagactgtcagagacgcaagacttcttgttgtatatgaagatgtttatgttcattttgaggataaatatccgcaggaagaatataaagaccaaattgatgaagctctttataagctccagaagacaatagttagaaactggataatgtatgaaaagaaacgtgtagacggcaggggaatcctggaacttagacctctttcatcagaagttggtcttttgcctagagtgcacggaagcggtttgttcagcagaggacaaacccagtgtttgtctgtaaccacattggctcctatcggagacgctcagacaattgacggtgttggtcttgaagaatcaaaacgttatatgcaccagtataacttcccgtcatacagcgttggtgaaaccagaccgtcacgcggtccgggaagacgtgaaatcggacacggcgctttggcagaacgcgcgcttttgcctgtactgcctagcgtggatgagttcccgtatgctattcgtgtagtatctgaggttttgagttcaaacggttcaacttcacagggcagtatttgtggttctacattatcattaatggatgcaggcgttccgataaaggcacctgtagccggtatttctgtaggtctgataaccgatcctgaagatgatgataattttattacaatggtagatattcagggattagaggactttttcggcgatatggactttaaagttgccggcactaagaaaggtataaccgcaattcagatggatcttaaggttgacggtcttacacctgctattatcaaaacagcattagaacagacaagaaatgccagattctatattcttgatgaagttatgcttaaagctatagctgagcctagagaaaatatttcagagtatgctcctaaaatcattaatatggctataccggttgacaaaatccgtgaggtaataggcagcggcggtaaagttatacagggtattgttgccgataccggagcaaaaattgatattgaagaagacggtcgtatttatatagcagccgttgacacaaaagccggcgagctggctaaaaagatgatagaggatataattagggaacccgaagtcggagaaatatatgacggtaaggttgttaagattatggactttggcgcatttgttgaaatacttcccggaactgacggtcttgtccatatttcaaagctggcaaaaggcagagttgaaaaagtgactgacgtcgttcacgagggcgatatgattaaagttgaagttattgagattcagccgaatggtaaaataaatctgagaaagattgaagattagtttttaaatatttaagcggtcgagtttaacatctttgttatacttgaccgctttttgtcattgtgatacaattacaataaatatattttgttttaggggtggattttatgctatataagataaatatacacacaggaagaggagaccaaatgatagatattaccggaaaggttcaggaatcggttaaggattcaggcgttaattcaggtctttgcaccgtctatgttcctcataccacctgtggattgactataaacgaaaatgccgaccctgatgtgcaaagggatattttgatgactttagataggcttgtgccatatgatgaccccaactttcatcattatgaaggaaattcagcagctcatattaagtcagggctttttggcttttcacagaatattattatagaaaacggacggctgcttcttggaacttggcaggggatttatctatgtgagtttgaaagggttaagacttcaagaacggtatatgtgaaaataatggaaggataaacagttatcctaagaattactaatgagtaatggatataagatgtttatcttaatatttttatatgttaaaaaactctgtcattgatgttaagggaacgttcttttactactatgactagaggtctaaagaattggcttttgcgcatattacaaaaacttttatactttaataacagtctaatacgccattgtggaatattccgcaatggcgtttgttttcagtctgagattgctgataagcaagctattattgcaaattaattattagtataaatgctatataaaaatttaacctttgcttctttgaatattgtatgcgacttttgcggcgagcctgtcagataaaaacctaaggccgaattttcctagtttcattgtggttccgggtattatgacagtctttttcttaaacattttcttaactgcgtacgaagccacgtcagcgctcttaagtcctttaatagcaaattttactccggcggtgttgttgaaacttgtgtttaccggaccggggcataacgcgccaatgtaaacatttgaaccgctctgcctgagttccatagctatagcttgggtaagtctgagcacatatgctttggttgaataataagttgccatcagcggtcccggcataaaagcagcagaagaggccacatttaaaatatatcccctgtctttttttataaaatcgtttagaaataattttgttagtatatgaagtgcggtaatattggtatctatcatattaagttcagtatttatatttgtattgttaaactctccgaataaaccaaatccagcattattaatgactatttccaaatcgtcttcattagcgattccctgaacattttgatataattcaaggcaagcgtttttgtccgacaaatcagaggatattatatatgatttcgttttaagcgaatccgctgttttttgaagtctttcattatttcttccgacaagtataatatcataacctaaatcacttaatttctcggctatatcacgtcctataccggaacttgcacctgtaaccaacgctttcataaaactcctcctaaagtataaaatcagggtcacataatagaaaaaattctatcggtgacccttagattatttattatactattatattatactttttcaactgagattataactttttcaccgttaatatcccattcttttccgtcattttcttgattttgaatttcatcagctaaagtctgtgtttttatttcatcagcaaatttaacgaatatatcatttattttattgcttccgctaaagtagatatttatacggtcttttacttcaaatccggaatctttacgcattgtctgaagtttgcttattatctcacgaaggaagccttcctcaatcaaagcgtcgtcaagatttgtgtcaagaattacggtaaatccaccgtcactgtctgaaacaagcccattcatttgctgggtttcaatcaaaacgtcatcttttgttatttcaacgtcagtgccttgtacattgagcttcagcgggcttcctgaatttagaacagacataacctctgctccatccatcttagccacctcgtcaaatataggacgcattagcttaccatacttcggacccattgttctcatctgaggcttaaatttgtatgatataaatccgctggcgtcttcaacaaactcaacttctttaatattgagttcatcgagaattatataaatatagtccggattaatttcagtatttgattgaatatacagttttttaagcggctgacggttttttatgttagcttcattacggcatgcgcggccaagcattatcacctttctgacagcgtccatatctttctcaatttcagggaaagacagcttttcatccatagacggataatcacaaaggtgaacgctttctggagcgtttttatcaaccgacaatactaggttctgatatatttgctcagtcataaacggtacaaaaggagcgcacactttagaaaattctaccaagacagtataaagcgtcatatatgcgttaattttgtcctgagtcatttcaaccgtccagaatctttcacggctgcggcggacataccaattggacagctcgtctgtaaattgtgttatagccctggctgactcaacaattttataattggcaaggttattgtcaacctcttttattacaccgcttaatttagaaagaatccatttatccatcactgaaagtttatcaatatccagtgtgtattttgtcgggtcaaattcatctatatttgcatagagaacataaaaagcataagtgttccatagagtacccaggaattttctttgtgactcagacacgttcttttctgagaaacggttcggcagccaaggagcagagttggaatagaagtaccagcgtatagcgtcggcgccctgctgatttagaacatccatcggagcgacaacattgccgaggtgcttgctcatcttctttccgtgttcgtcctgaacatgtcccattacaacaacgtttttataaggagattcatcaaacagcaatgtgcttattgccattaatgtgtagaaccatcctctggtttggtctatagcttcactgataaaatcagccgggaaatgcttttcaaacagttctttattttcaaatggatagtgcagctgtgcaaacggcatagagcctgaatcgaaccagcagtcaataacctcaggaactcgggtcatttcgccgccgcattccgggcattttaatttaacttcatcaacatatggcttatgaagttcaatatcatcagggcagtttattcccatttctttaagctcttctattgagccgataacatgtttatgtccgcatccgcattcccaaataggcagtggggttccccaatatcttgaacgtgacagaccccagtcaataatattttccaggaagttaccaaaacgtccgtgtttaatattgtcaggcatccagtttacggtctcgttattagcgagaagtctatcgcgtacggcagtcatttttataaaccatgtgtcgcaagcgtaatacagaagaggggtatcacatctccagcagaacggatagctgtgttcaaaaggaattactgagaaagccaagtttctgtctttcagattacgaattataagcttatccgcatccttaacaaaaagcccgctaaggtctcctgtgccgtcaacaaacttaccctgactgtcaacaagatttataaaaggaaggttgttttcaactccaactcggttatcatcttcaccaaaagccggcgccgtatgtactataccggtaccgtcttccattgtaacataattatccgcaacaaccctatatccgtctccctcaggctttgcaaaatcaaacaatggttcataatgcataccgcacaggtctgtaccaatatattcttctaaaattttatattcgcagtccttaggcagaaccttttcaagcaaggcttttgccaaaatatacttttcatctccgcattcgattttaacatatttctctgacggattcacgcatagggcaacatttgagggaagggtccatggcgtggtagtccatgcgagaatatactcgcctttcggagcatctttaatctgaaattttactataatagaattttctttaacgtctttatatccctgtgcaacttcatggctggacagagcggttccgcagcgaggacaataaggcatgattttatgacctttatagagaagtcccttatcccaaatttgtctgagagcccaccaaaccgactcaatataatcattgtggtatgttacatatgggttgtccatatcggcccaaaagccaacgcggtcactcatttcttcccaatcgctttggtaaacaaagacgctgtctttacactttttgataaagtcttcaacgccgtaattttctatttgaggtttgccgctgatgccaaggcttttctcaacctcgagttcaacaggcagaccatgggtatcccagccggcttttctctcaatcaagtatcccttcatcgtgcggtaccttggaatcaaatccttaattgcacgagtaagaacatgacctatgtgaggctttccgttagcggtaggcggtccgtcaaaaaaagtaaagatttcggctccctcgcgattctttatactctttttaaatatatcgtttttcttccaaaagtcaacgatttccttctctctgtcaacaaaggaaaggtcggttgatactttgcgatacatttaaatccctccaattctataataaattaattcttaacaaaattatatactcattaattttttcgataattaaccttaatattgtatactaatttaaaggatgtgtcaagggctgtaaagaggttttttaagcctccgaaatttgaattaaattagataaaaagccgtttaatttattatagattttcaaatgtttgcggacaatactggaatgtgtattttacaatttagtttattgtattatatctttaaggttaatattttgaagacgaaataatatttttaaaacgagttagatatttttttatgatatgttataacatgaacagcgttaatataaaaatgaaaagggtaataaaaacctaaaaaaatctactgtactgcatttccaatctaaagtacaaagtgtccattaaaatatatataatattttttgtgtttgggttacagatattttagtagtaatataagaaaattagtgtatataatacacttaagatgaaggtgttattattgtctgacttaaactttttacgtatctttttagaaattaaaatatagatataataattttgaattgaatatataaattaaaagcaccggaacatatatagttcggtgcttttgattaaaataaatcttcgtttctgcttgcaatctcttcagcgtgggaggcttttaactttgccagttccagcgctcttttatttttaacttgctttctgttttgaatttgatttttacttgaatatgttttgttataatctggagcagcatttctttttgaaaataacgccttgttctcctcatccgcctgcatatttgcaagcgcttcagcatgttctcgtttggctaaagcaagctctaaagctgttagcttttttgccggcggtgttatcgtaacaggctcagtttttttctttctcttttttttctttacggctttttcagcttttttagcttttttcaagatttttggctccgagacagtaacatactttttcttttttaaaggagttctggcacggaataatgcttctgtgttatcatcctttttaaaagttctcaaaaagtatttaggattcagagcggcgccgatagttctgaaaaatcttccttcagccaaagcgtagtcaggcattttggcaaaagcatatgtaaacagcgttccgattaagaaaaatatcggtggcagccaaattgacgcatatggttgaaactctaaaatttcaccaatttcagatgaatttatgcttgaaataccaagtgtaaccaatacagaaaatcctatgctcaaaagtgttccaacggccgatacacaaaagtttataacctgaataagtctaaatccaaataaagacattataagagcagcaagaccaaaaacgaggagcactatacagcctatcatcaaaagctgtatttcaggcggagtagtcacaccaaaaaagtcaaaaaactttgaaaccataccaaaagcgattgatgaaatgctgaacccttcagttacatcattcagttcaatcgaatttattccaaacatcggcaagcgctgtgagataaacaataaaatataggcagcaatcgcaaatgctttaaaactaactttctgcaaagctgttatgaaaagcttttctgttttcattcgttaaccctccttgcctacgtatgttttattataataaaaataacttgtttcgtcaatacataattagaaattttgtcggtttttagtctaataccccaagttttataattcttccggagcgaagaagccccagcatagcccaatacattataagaatacgaggttcaaacaagttagaatccagcagtgaagaaatagaaattccaagcagcgcggcaagtccggcggcaaatataattttttggcgcggtgtggctctgaacatacatgttatggaagagtgtgcaattcttaaaatataatacataaatccaatcataaatacagcgccgacatctatgagaatgttaaagtacacagcgctgatgtgaaggttgggtatgtttatcaaagtgccgccttccccgtaatgctgagctgtggaattatagatgttgacaaagttgtctgtgctcactccaaatccatttgtccagaaatttctcaaagtatagacaatgttttcaataatatttccgttattgctgccgttttgccacattaatataatgttgttgagtacgcgccctgaaaagaacggcgccaaaaacagaatcattggtatataacgtctgtcagtcaaaatgattacgataacaagctcaataaaataagcaatgaacgcggctttagactgtgtggccgagataacccaaaaagatactcccataaccagtattgaatatataaaccgtctgattttagattctaaagttatgggataaacaaatgcgaaaggaaaaagcagtaccaatatctcagcaaaaattgtcgaatccccgtaaacgccttgtatagctatgctcggattgtcggcatgataagcctgaactatcccggttatacacaaaacgaccattgccaggaaaagagacattaaaattaattctaaatcatcctgagttctgactgtgaatgatatcagaaaaaataaatcaacagccaataaaaagtatgaaagggatttgcaagccgcaatcggtattgacatgctcatcatagctataaacatgaatataattatgtttatcagaataaatataacgcctgtgcgctgagtggagttatgagaaatataaattagcgatacgagcatgaaagccggaaccatataaaaattatcccatagagatgatgggaataaaagcacaaacagcagaaacacacctatatatataggatgaaacttaagccttgaacggggaatataaaaagcaaaccggcgtatgcctattgtggtatatctgtaaaacgcacttgcataccaggcttcgccgacaactttagtattaaaaaatatttcaagatacttattattcataatttttttttcaaaccaagttataattgctaaagtcttactatgaataaaatcgtatttcagacgcggaatcagaatatttgtgatccacataattatctcatataaaaaactgtttttatatatgtctattatctcttgtctcacatttatatcctccaaaaatctcattaacgaatatcgctgatatagacatcaaaaattacgtcaccaataatgatttgagcagattgacccatcaaataaatgtttttatcaatttttataccgtggtctgtcttcataccttcaaccgttgtaacaaattctgctttagcccgaacaggctcaggcgttggaaaaggtgtgggagacggctggtcttcatcatcgttttcattattttcagcgttcccgtttgatattgcggcaacggaataattttcagttattggagtaagatttatattatcaagcacacctatttcattaccatagcttccgtcaatgcaaatgtcgccgtattcaactttgtttaacaggtcgattggcgagctttcacatacataggtaatagtgtaggtttcatatttattgtttcccctgccccaagctgatttgtatataagagcagcgacgctgagaataatgattgcaagcagcaagatatctattatatttaatttccagattatttttttcgaaagcataatttatctcctatatatgtttaaattgccacattaatacattatatattatatcgctttttgatatttttttcaatccatatttttagttttaatattacaaaatatttactaatatcaatagagaaagatttttaaaatttttatataatttatctgaagattttatcattccgattatagcaaggagcggcagtaaatgttttataaagttttatttagaaaaaattgtttacatttcaactgcgacaaacaattttgatctgacaatgcttgtataaatacaatacttttttaattatattaaatttaaaacgaaagattagtatcagaaggtgtttttagtgaacatcggcagggtgtgcgtaagcacacctcgttaggtgagctatcatatcacgcttagcgtgaaaatatttaaaactatttgttataaatatttttactaataaatttttccgatattgagtactttacgcagcaaactgctttcgcactgcgtatttaaaagaaattgataagtgtcgtgaaagatgagtggtaacgggaattattttaattatagttaacttctatatcataaaaacatatgtcatctattgttaaatttcagaatttataagatagtttatctaaacaataagttagataaaagtttaacaaagcggctgatttgtcataattattttttgtgaaaaatgttttttaaattggattgacaaatatttaacaagtgtgtataatgtgtattgtaaagagattgataaatatttaacaatttattccgtaataaagaataaaagcaaaacactttagtctgtgaatctcattaattatttatagtaaaagttaagtttttataatatttacagaaaagtgatttatgattagcatattatggatataattgttattaggcctaatttaggcttcactaagaaaattaattaatttatatatctgagaggagtaagaacttatggtaagtacagttcaggaacttgagcaggaaataaaaaaggtaaggaaagctcagcaggagtttgcgaagttctcacagaaacaggttgatgaaatatttaaggctgctgctatagccgccaataaacaaagactgccgcttgcaaagcaggcggttgcagaaaccggaatgggagtagttgaggataaagtaataaaaaacaactatgcagccgagtatatttacaataaatacaagaacacaaaaacatgcggtgttatagaagaagattccgcttatggtacaaagagaatagctgaaccgataggcgtaatagctgcagtaataccgactactaacccgacttcaacagctatttttaagactttgatttctttaaagacaagaaacggtattatcataagccctcatcccagagcaaagcaatgtactattgacgcggcgagaattgtatatgaagccgctgtaaaagcgggtgcacctaaaaatattatttcatggatagatgttccgtcgcttgagctcacaaatatgcttatgggagaagctgatactattttggcaaccggtggtcccggaatggttaaggctgcatattcatcaggaaagccggcgcttggtgtcggagccggaaacacgcctgcaattatagatgatactgctgacattcttttggcagtaagttcaataattcattcaaaaacttttgacaatggtatgatttgtgcttctgagcagtcggttatcgtgcttgattccgtatattcaaaggttaaaaaagagtttgccgacagaggatgttatttccttaaaaagaatgagattgacaaggttagaaagaccattttgataaatggagcgcttaactcaaagattgttggtcagtctgcttatacaatagcgaaactttcaggagttgacgttcctgaaactgctaagatattaattggtgaggtcagcagtgttgaactcagcgaagagtttgcacacgaaaaattgtctcctgttcttgcaatgtataaagcgaaagattttgatgaagcgatagaaaaggcggagcatttaattgctgacggcggatatggacacacctcaagcgtttatctgaatgcggttactgaaaaagataaactcaacaagttccaggccgctatgaaaacctgccgtatattggttaataccccgtcatctcacggaggtataggagacctgtataactttgatttaaacccgtcactaacgttgggatgcggttcatggggaggcaactctgtgtccgaaaatgtaggagttaagcatcttattaatataaaaactgttgctgagaggagagagaatatgctttggttcagggctcctgagaaggtttactttaagaaaggctgtctgccggtagctcttgaagagttaggcgttatgggtaagaaaaaggcgtttattgttactgacagttttctgtacagcaatggttataccgacccggttacaaacaagttggatgaaatggggattaaatacagcgtattttcagatgtagcgcctgacccgacccttgcctgcgctatcgacggcgccaaagctatgacggcgtttgagcctgattgtattatagcaatcggaggcggaagcgcaatggacgccggtaaaattatgtgggttctgtatgaacatcctgaggctgactttatggatatggcaatgagatttatagatattcgcaagcgtgtgtacacattcccgaaaatgggagaaaaggctatgtttgtagcagttccgacatctgccggtaccggaagtgaagttactccttttgcagtaataaccgacggcgacagcggtgttaagtatccgcttgctgattacgagcttatgccgaatatggctattgttgacgctgatatgatgatgaatgcgcccaaaggtttaacgagcgcgtcaggtattgacgctgtttcacatgcacttgaagcttatgcttcggttatggcgactgattatactgacggtttggctctgcgcagtcttaaaatgatatttgaatatttgccgagagcctatgataatggtccaaatgacccggtagcgcgtgaaaaaatgggaaatgccgctactatggcaggtatggcgttcgctaatgctttcttaggtatttgccactctatggcgcataagcttggagccttccatcatctaccgcacggtgttgcaaatgcgttgatgcttgaagagattatgagatttaatgctagtgaagttcctacaaagatgggaacgttctcgcagtatgaccaccctcatactttggcaagatatgcagaagttgctgattatctgggatttggcggaaagactgatgaagaaaaacttgagaatcttatcaaaggcataaatgaactgaaagagaaaataggaatcaagaagacaataaaagattatggagtggacgaaaaagtatttttggatacgcttgacgaaatggtagagcaggcattcgatgaccagtgcactggagcaaatccgagatatccgcttatgaaagaaattaaagagatgtatttaagggcttactacggcaaataaatattgattaaccgttgttggtttgttataattaatttaagagaatcccgccgttggcgggatccgtttaaattttcagtggcgaattttcgacgctgaaacattgaataacggggcaataccccttattgaattaatttaagagtaccctgctgttggcgggatccgcttaaattttcagcgccgcaaaccgccgctgatacattggataaagggcaaaacccattatttgatattgttaacaataggtcacgttgattctgaaaggagcaaacaattatgaagtacgaaaaaattcttgccgagagacccgataaggttatttataaagacggcgaaaatgctttaaaagtttttaattccaattattctaaagcagatatattgaacgaagcgttgaatcaggctagagttgaggaaactggattaaatatacctgcactgaaccaggttacaatgattgacggacagtgggttatttccacaaaatttattgaaggaaaaacgcttgctcagttaatggatgagaatcctgagaaacttgatgaatatcttaacttatttgttgatttgcagctggaaatgaataaggagactgttcctcttttgaacaagttaaaagataagatgaacagaaaaataagcgagtccgggtacgacgctactacgagatatgagctgcacacccgccttgagagtatgccaaagcatacaaagctttgccatggtgattttaacccgagcaatattattgtcaccgataacggaaccccatatattcttgactggtcacacgctacacaaggaaacgccagcgctgatgttgcaagaacatatttgctgttttgtttagacggcaaggaggagcttgctgacaaatatcttgatttgttctgcaaaaagagcgacacggcaaaacagtatgttcagaaatggatgcctgttgttgcggcatcgcagtctgtaaagggcaagcctgaagaaaaggaatttttagacagatgggttaacgtggtagagtacgaataagaaataagttttggaaactctaaaaggactgtaaaaagtcatttttaagaaaaacaataaaaaccattgtaaaaagacttttattgtctaaatacaatggttttttattatttatatattttattgtgctgtatgacaatctgattatagtctttttatattctgtttggttctttttaatttattatattttttaatataataacagattcaataatattttttgttacagtgcaacattcattaacgttagtataaatattattatcaaagcacagatatataatttagcttcttttcgtattgcctttaagtttgggtcgttttcataatccgtattaaataaagtttgaagaccaatgaaaataggacgtttaacttctttctttccggtgacaagaacgttataatatctgtcatataggtcgtgatgataagtctttatgtatttatcccctttttttgcgatgtcaaaatatgcaaacaccattaccattaatgataaaaagaaataaacgcctttaaaccatccttgtaaatctccgccgcttctgagagtagaaaagactacgtacaatgctccgcagattattaaatatacgtataaatgtgatttatatcttgtttccattttgctttctccatttcataatacatcatgtgagattattttaacatcaaggcaaaagcttgtcaaccttaattatattttagttatattatttgtattaaaggtatatatattattttaatttataaaaagtaatgtgttaaatatataacatataattaaaaatcagtgttgcaaaaggtaattttttgtgatacacttataaagtctgggctatgttgtgaatgtggttttcagaccattctaaatataggaaatacagtaaatattacatacgggaggtctcataaaatggctataccatttaagggaacaaaggaacaagaggaacagctgaaagcggtgattgaatctcataagggagagaaaggtgccactattccggtgcttcacgaagcccaggagatatatggctatcttcctattgaggttcaggaaatgatttctgagggtcttgacgtgcctcttgcagaaatatatggaatcgttactttttatacccaattttctcttaatcctaaaggggtttatcctataggagtctgtcttggaacagcctgttatgtcaagggcagcggagaaatacttgataaaatgaaggaaatattaggcatagatgttggagaatgcacagctgacggcaagttctcattggacgctaccaggtgtataggagcgtgcggtttagctcctgttattactattggtgacgatgttcacggcagattgaccgccgaccaggttgaggatatattaaaacagtatcagtagaataaaagttaatgcataatttataatttataattcatttttatatatgaattatgagttgtgagttgtgcattaagttaatatatttgttcaaatttttgaactctgtttataaccaagtataaaggggtggcttatgctattatctgatgttaaagcggaaataaatgctcaggtcttgaccggagaaaatgatgaaagccttggagcggttgatatacataacgcttgcggcagtgacttgatgagcgacgtgttggcttttgttaaagaccaaagtctcttgcttaccgggcttgttaatccacaggtcgttagaactgcagagatgatggatatcatagctatatgttttgttagaggaaaaactccgcccgaaagtcttattgagcttgcgaaagagcagggaatagtccttctaagcacaaagctgcctatgtataccgcatgcggcagactttacagaaagggtttggagggcaggaaagatgcagaaacattatgatgtagacggccatgatttttcgatagcaggggaagcttccagcaattttaaaagttatcttaagaagctgggtatagcgcctgaggttatacgccgagttgccatagcaatgtatgaagctgaaataaatacaataatacacggcggcggcggaatatgcgacgccgaggtgtcaaaggacagaattacgattactttcagagaccatggccccggaattaaagatatagatttagccatgcaggaagggtattcaaccgccagcgaccaaattcgtgaaatgggtttcggcgccggaatggggcttcctaatataaaaaaatatacggacggcatgaatatagattcaaaagttggggtaggtacaacggtagaacttattataaatatatgaggtgagggtatgtcatactttcattccgtcacacttgataaagataagtgcaggggctgtacaaattgtataaagcgctgccctactgaagctatcagagtcagaggcggaaaagccaagataataaaaggccgctgtatcgactgcggcgaatgtattagggtttgcccataccatgcaaaacgggcggtaacagatgattttgaggaactgaaaaattataaatataatatcgccttgcctgcgccttctttatacggacagttcagcgatgtaagcgatataaacgttatactcaccggccttttaaaaataggatttgacgatgtttttgaggttgccaggggagccgagtatataagcgcggcgacaaaagagatatataaaaaacgaagcggttcaaagccattcataagcagtgcgtgtccggctgttataaggcttatcagggtcagattccctaatctgattgacagcattattgaccttatttcaccaatggaaactgccggccgtttagcaaggaaagaagccgtccaaaagaccggacttaaaaatgaagaaattggggtgttttttataaccccatgtccagccaaaatgaccagtataaaatctccgttgactttggataaatctgaaataagcggggcaatatcagtcaatgatgtgtttgcaaagctttttccgattataggagatataaaggagccaaaagctcttatgaaatcttccctgagcggagtatattggtccagaagcggaggggaagcggacggcgcggctatagagaattatatagctgttgacggaattgaaaatgttattaaaatacttgaggaaatcgaagacgataaggtttccggtattgactttattgaactgtcggcttgtctcggcggatgtgtgggcggcgttttgaatgttgtcaatagctatgtagctaaaaatcatataaagaatatatcaaaaactttacacaacagaccatgcgaaacaaaagatatagatttgggttctctgtcatgttcaaaaaagctggagtatgagccggttatggaactggatgatgattttgacaaggctatggaaatgatggatgagcttgaggaaatatatgattctctgcctcagctggactgcggatcatgtggcgctccgtcctgtaaagctttggccgaggatatagtgagaggttttgccgatgagagtttttgtatagtaaatatgaaagctaaggttcaggaacttgctactgagcttttggcgtcagataaagataaccgtgaagaggaggagtaactctatgaaaatatcagatttagttaaatttggcgagtatgaagttttaaccaatcctgactatgaggataaagaaattactggctgttatattggtgatttgctgagctgggtaatgggcagagctaacagcggagatatgtggattaccgttatgagcaatataaacattgttgctgttgccacattgtcagacgcttcatgtattgttcttgccgaggatgtggatgttgaaagcggaattatagataaggccaattcccaaaacgttgttattttgaagacagcaaaaacgagttatgaagcggctgttgattattataaattaagcagtaaaaatgtttagctatgattttcatattcattcggcattgtcgccctgcggcagtatggatatgactccgggtaatatagttaatatggctaagcttttagagattgacgccatagctctaactgaccataacactattggaaatgctgaagctgttatgaaggcaggaaaaaatataggcgtatctgttgttccgggtatggaggtggaaacttccgagggtgttcatgtgcttactctgtatccgaatatggagcgtgctagtgaagtttcgaattttgtatacagccggcttccggatatagaaaataagccggagatttttggaattcaggcttatatggatgaaaacgacaatattattgactatgagaaaaaactgctcatatcgtcggcttccatatctataagcgaacttttttatatagttagtgaagcgggcggattgttttcgccggcccatgtcgacagggattcatacagcgtgctgtctaacctgggatttatcccggaagacatacctgtgaagtggatagaagtttcaaagaacgttgaggatttggaagcttatctgcgcatgcgtcctgacttgaaaaagtataaaatacttagaaactcggacgctcactatcttgagagtatgccgggacagaaaaattttcttgaacttaacagtgttgatgaactgtttaataaatagaactatttgataaataattgattggtggtgagctgattgaaagaactatctcttaatattttggatattgttcagaattcagtaaaagcggaagcgacattgattgaaataattattgatgaaaatattgatgatgataaactgacgattgttgtgtctgataacggatgcggaatgagtcctgaatttttaagccgtgtcagagacccgtttacaacgacaagaacaacacgcagggttggtatgggaatacctctttttgaactcgccgcacagcaggcggggggaagccttgagattacttccgacgagggcgttggcacctgtgtcactgccagatttcagtataatcatatcgacagagcgcctgtcggcgatatggcaggaacaatggttactttagtgtctgttaatccggagattaattttatttatatacatagggtaaatgattcggagtttgtgtttgacacccaggaaataaaagaaattttaggcgatgttccactggattcaacagaggttctgtcttggataatggattatattacagagggtctcggaaagataagagaagacaaacaaattagtaaataataaattccatatatagatttattgacagtaggaggtcaaaaaatgaagagtttggaagaattgaaagcaatccgtgacagggttcaaaaccagatggatatgcgtaatgacaatgataatgataccaggattgttattggtatggcaacctgcggaatcgcagcaggagctagaccggtgctgaatgaatttttgcaggaaataaacaagcgcggattaagcggcgttaccgttacccaaacgggatgtatcggtatgtgcagacttgagccgattgttgaaatatttaaacccggcgaggagaaggtcacatatgttaaaatgacgccggataaggtggctaaggtagtgacagaacatatagtaaacggcaggccggtcatggaatatactattggtgcggcacagactggaggtaaataaccaatgaacatatatagatcgcaagtgcttgtctgcggaggtaccggctgtacttcttcaggcagtgcactgctaatagacgagtttgaaaaacagctgaaagaaaacggcttatatgatgaggtaaaagttgttaagacaggatgttttggtctgtgtgcgctgggaccgatagttattgtctatcctgaaggcgcattttacagcatggtaaaaaaggaagatgtaaaagagattgttgaagagcatctcttaaaaggtagaatagtgcaaagacttttgtatgatgagtctgtacatgagggcactgacgaaataaagtcgctgaatgaagttgatttttataaaaaacagcaccgtataactttgagaaactgtggtgttatcaatcctgaaaatattgatgaatatatagcaagagacggatacgaagctttgggtaaagcgcttaccgagatgaagcctcaggaagttatagatactataaaagattccggactgcgcggcagaggcggcggcggatttccaaccgggctgaagtggcagtttgcggctaactcggtaaatgagcagaaatatgtctgttgtaatgccgacgaaggcgacccgggtgcatttatggacagaagcgttttggagggagatccccatgcggttttggaggctatggctatagccggctatgcgataggctcaaaccagggatacatatatatcagagccgaatacccgattgcggttcagagacttaatatagctataaaacaagcccgtgaatatgggctgcttggaaagaatatatttgacagcggatttgattttgatatagaaattagattgggcgccggagcttttgtctgcggtgaggaaactgctctgatgacttcaatcgagggtcatcgaggcgagccgcgtccccgtcctccgttcccggccgttaaaggtttgttcggaaagcctactatacttaacaatgttgagacgtacgctaatataccgagaattatattaaaaggcgcagactggttctcaaaaattggtaccgaaaagagtaagggcacaaaagtgtttgctctaggcggaaaaatcaataatacaggattggttgaggtgcctatgggcacaacactgcgtgaaattgttgaagatattggcggtggaattccaaacggtaagaaattcaaggcggcacagaccggcggaccatccggcggatgtattccggcagaattgattgatactccaatcgactatgattctctgatagctattggttcaatgatgggatcgggcggacttatcgttatggatgaggacaactgtatggttgatatagctaagtttttccttgagtttacagttgacgaatcctgcggtaaatgtactccgtgccgtgtcggaaccaagagactgcttgaaattttgactaagattacagacggcaacggaacaatggaagatttagatcgtcttgaaagcctggctgaagctattaaagccggctcgctgtgcggtctcggacagacagcgccaaatccggtgctttcaactttgaagtatttcagagacgagtatgaggcgcatattattgataagacttgccccgcgcatgtctgtaaggggcttgctaaatatgaaattgaccctgaaaagtgtaagggctgcgggctttgcgctagacagtgcccggtgggagcaatttcgggacaggttaaaaatccttttaaaatcgacagtgaaaaatgcattaagtgcggcgcttgtcttgagaagtgtccctttaaggcaataaccaaataggaggagatagaaatggcagataatgtaaatataaaaattaacggaatagaactatctgttcctgccgactatacggttcttgaagcggcacgtgaaaatggcattgatatacctaccctgtgctatttgaaagacatcagcaaaaccggttcttgcagaatgtgtattgttgagattaaaggtgcgagggctcttcaggcggcatgtgtttatccggtgtcggaagggcttgaggttatgacaaacactaaaaaggtcagagaccaaaggcgcgtcacacttgaacttttgttgtcaactcacgagaaaaaatgtctcagctgtataaggaacaaaagctgtgaactgcagtcgttgtcagaggagctgggagtagattcaatagagtttgaaggcgatatgaacagttttgaaatagacgacgtgtcaccgtcaattgtgagggataataataaatgtattctatgccgccgctgtgttaatatgtgcaaagacgtacagactgttgcagttattgacaccatgcagcgtggatttaataccagggttggcacagcttttgaaaaggcgctgtcagatacggcctgtgtaaactgcggtcagtgtatagtgtcatgtccaaccggggctttgagagagaaagataatacacaagaaatatgggacgcaattgcggacgatgacaaatatgttgttgttcagacagctccggctgtgagagccggtctcggcgaagagttcggattcccgataggaactccggtgacaggaaaaatggcagccgcactaaggcgtttgggatttgacaagacgtttgataccgatacaggtgcggacttgacaataatggaagaggcaaacgagcttttagagcgcatacaaaacggaggaaagctgccgatgataacatcgtgcagtcccggctggataaagttttgtgagcataacttcccggactttttggataatttatcatcatgcaaatcaccgcatgagatgttcggcgcagttataaaatcttattacgcaaagaaaaacaatatagaccctaaaaagattttcgttgtatcagtaatgccttgtgtggctaaaaagtttgaagcaggacgtcctgagatggagtctgacggacttagagatgttgatgcggttatttcaactcgagagcttgcgagaatgataaagcaggctggtataatgtttgacagactgcctgatgaggaatttgatgttccgtttgaacgtgccagcggagccggagttatattcggcgcaaccggcggagttatggaagcggcgctgagaacggcggcagatacgttaggcggaaaatctgttgaagagattgaatataatgacgtaagaggcgttgaaggaataaaagaggccacagtaaatatgggcggtattgatgttaaggttgctgttgctcatggcttaggaaacgctagaaagcttttaaacaatattcgtgaaggcaaggcggattatcactttattgagataatggcctgtccgggcggctgtgtaaatggcggaggacagcctatagttccgtcgagactgaaaatggatattgatgtcagaacggagcgcgcaaaagcgttatattcggaagacagagacagcaagattagaaagagccatgaaaatcctgatatgacattgctgtatgaggacttttttgaaaaaccgggttcacatcttgcgcatgagctgctgcacacgacgtacaaagagcgcgggagattttaattattataaaaatgcccttctgaattcagaagggcatttttgttggattattgtttttattaatatggctatattataataatttaattaaagtggaaagttatatatactgtataattgagttttttataataaaaattttattttgttttgcgtgtatattataatgtttttatatttattaatttttaaaataataaaattatatactatgtatatgaccccatataaaaaatttattattacataatagggtgtttgaaccatttctttttcttgcgagaaaaagaaacgcttcaccaaagaaaaagtgctgctcgcttaggtcgcctgcggctccaaggggcgctcgcaccccgctcatttcatcatgaagcatggcttcatgatgaaaaaagccctactactttcccgttgactttgtgtactaccgtgaaaatagatattctgagtttctatttatttaatttactaaaaaagaaggtttttcagtgaacatcggtaggcttgcgatagcaagcgcgtgaggtgcgcagtagcggaattgttaatatcttttattattttctttatagctttctataagattaattatcagttctgtatctttttcatttagtttatttattccttttattattttatgtattttttcaggatacttcatattttcattaaaaaattcatatggcgttattccaaaatatctgcatatttcgaaaaattcgctcatggacggcattgcttttcctgatgatatatgatttatatatccttccgaacgtcccatatctaaactcatacatctttctgatatgttttttctcattcgcaattctgttattctttttcttacaaaatcttcaaacatttatattccctttcctatatattatatatattataaaatttattcataataatttgatgtatatttgattcattttctaatttttttcattattttttaatatttttaaaaatataaaatatgtttttgattttcaattgataattgtctgaaaatattagttgtttcttcaatataaatttactttataatctgaatatcaatttgtggtaatattataatttgataaaaatttagtgtgttttattaaaaaaataatattatttattgatagtttatttaaaatatgataatatataaaaataaaacgaggtgataaaatgtcagaacgtcttaaagaattacgtaaatctcttaaaatgaatcaaacaaactttgcgaaacaaatagggataactcaaacggcgtattcaatgattgaaaatggaataaatcctttatcaaacagacatatcaaagttatttgtctggcatataatgtcaatgaaacgtggttgcgcacaggagaaggagagatgtttatttcttctccatatgaacaagagtttgttaaaatattcagcaagttaacaacagagactcaacaacatttattgtgtattatcaaagaacttctaaaaatacaaaatgaatttgtaaataaagagcaaaaatatgatgctgaataaaaactatattttatactgttataaaaacaggtaattaatatattgaacactgcgtgttcagatgatagctcacctaacgcggcaaactatgtttgccctaccgatgttcgctaaaaactctgctttttatgcattaaattaatatgaactcgaaaaatcttttttcacggtagcacacaaagtcaacgggaaagtagtagggcttttttcatcatgaagccatgcttcatggtgaaatgagcgtgggcgagcgcccattggagccgtaggcgacctaagcgagcagtactttttctttggtgaagcgtttctttttcttacgagaaaaagaaatgtttcaaatacctattataagtaaaataataaatattatatggggtcatatacaaagttgattttaatgaatgttttctttatataatgaacactgcgtgttcagatgatagctcacctaacgcgcttgttaacacaagcctaccgaagttcactgaaaaccacatttttatatattaatttaaaaggaaaactcagttttttcaataagtaaaatataaatattatatggggttatatacatagtataataaataatattttaattaacaattgtcgataaatagagtatatttgttataaaaatttgagtttgatataaacttgtaatagagaatggcgcaaaatcaataattttatgaatcataattagtgtcttaaataagagatatatatgtaaatctcggtcaatagatgatgtatattagagcacaaaagcatacattatatatttcaaaattctatttatttataattccaatcaagcctgacccaggcaatatttataaatcccttatgttttcatatcaaaatattatgtcaatggatgacattattttattttaatatacggaaatattatacagattaattgcgcaacatactgttatattgccaataattaaccttttagcttaaaaatagtcatttatctatgtaaaatagcaataattcttgttgaaaaaaacatttgtttatggtaatatatctatatgattttaattgtaccggcatacaaattatattggaggtgctgtttttatagaggggaataacagttgacggtataatattaagttcttaaatttttggagcaaggagaatttttatgaaaaggatattatcatttgcagtagcaatctgtatggttctgtctgtttgtttcgtcagtgtgtccgtttttgcggataatgcggaactgcagggtaacgctttgccagcctttcccggagcagagggcggcggtaagtttacaaaaggcgcacgcggcgtattggatagcggtgaaggtaaattagaggtttatcatgttacaaatttaaacagcgagggtccaggttcgtttactgacgcaataagccagtcaggaagaattgttgtgtttgatgtgggcggagttatagacgttcctagtaccgtttatatcaataacgataacataactatcctgggtcagacagcccctggtgatggaatcacacttacaggcggcgatttgcgtataggcaatggcgtgaaaaatgttattattagatatatgcgcgttagaccgacgaataaaaatggtcaggaagttgacggcttaggcggtcaatggaactcggatattattattgaccattgctcaacaagctggtgtgttgatgaggggctgaccctttatgcaggttcggctgaatctgatacatatgagcagggaaagcgtttgacagttcaaaatactatcacatctgaaagtatgagaatgtcggggcattttaaaggcgcacacggttatggcgcaattattggaggaaccaacgccacatattaccgcaacttgtttgctcatcacgacagccgttcgccgagacttgacagagttctgcaaaatacagactttagaaataacgttgtctataactggggcgtaaccaactcagcctatggcggcgagcctacttcaccgcataataaggttataaatccgtcaaaggttaattattcaaataattattataagtacggtccgagtacagtttcaggcaagagataccgtatatatgattttgcaaagatggctaaagttattgacggagtgacttataagagcaaattctatatgactgataactatgtggttggaagctcaacggttactaataataactggtctaacgacggcaccaacagtgcggctgaccaggtggaaaaggttgacacgccattttctttaggcgatgatttgtatccggatttgaatattgcagaaggaaatatattgcctggaaaagacgtaatgtcaaatcttttgcctgacgttggagctactcttccaaaaagagacgcaactgacgctcgtgttattgccgatgttttaaatcagaccggaagaattattaacaatgaagaggaggtcggaggactctccgatatcgaaagttcacagagaacctttgaaatccctgcagattggaaagctgcaaatggtatgggagccggcgccgctgaagctgatatagtgacaagcggtgtatgggcaggatatacatgggttgaagcttatgtaaatgattggactgagcagcaaagcgctcaggctccgacaaatcctgaaatagttgttacaagcccggttatcgcttctataaacagcaccgttgatggtcagactgttcaaaagggaaactggactgttataaaagacacggatacattaagttataaagcgtctgcaaaagctgctgacggaacaaatataacaaaaatggaactttacgatgacgagtcattgattaaaacatacgacggagtttcttcaatagatgattcacttcctctcggtataggcacacattatctgtcatgcgttgcgcataatgataaaggtgagaagaccagaagcactatttcgattgtttatgtaacaggcacaaacaagcctgagggctggactcagaaacaaatcgggccgcctgcatattcgggaaaaggaatagtttcatatgatgctgatacagatatttatactatgggcggcagcggtaagataggcggaaagtccgataagcttgattttatgtataaagaggttacaggcgactttgacatatctttaaaaatggaagatataatggcaaatgagaatggagcagttttgggactgatgctccgtgaatctcttgacgccggttcaagaatggctgctttggtagacggctggataaaatatggcagaaatgaccgtattgttgcccgcactactaaaaacgccaatatagccatcgatagtgaaaattccaattctactgataataaaatgggaatatttatgagaggcaaggaaggcgagatagtttccggtaacattttgggtgaacacccttatgatacagctgaaaacggaaaatatcatttgccaaactatctgagaatacaaagaagcggagataatcttttgttctcagtttcggacagcggaactgactggaaagataatgccagacagccgtatacaatgaaaataagcggtttggcaaacaaactttatgtcggggttgctattgattcacagcagggacagtctgacgcatcgccgcaggcatattactcaatggcgaaattcagtaatttaaagcttgaaaaccagtcgaattttgacccgggcgctacagatgagccggttcctactcctgacgcaggtctcaccgattatcctgattggaatgttggtcaggttagtgcagctggaactgacggagacgctgtacaaattgagtatgaaggtaaaacggctgtaaaaattaacagcagaaatatctacacagctctcagcgaagtgaaaaattctgatgtagtaacttttaatactgatatgtatctcagtccgtctgataaaaatggattcagaatatatcttgaaaatgataaagcaaagaattatcaggatagttcaaatagtttaggcggagtgtttgcagaggttttaaattcctcaaatggttctttgtgcgtaggtcctgctatgggagccgcaaatgctgtctatgacttttcaaatgaacaggcagggtggttcaatattgacatcactttggattatactaaagaaagcacatctgataattttattacagttataatcaaaaatgcggcgggagaggaagtagtaaatacttcaatgcccgctatagacggaattgattccggtttaaagcagattcgtctgattgccagaagtgctcagccttattttgcaaatatgacagtagagacaaaaccggcaggagacgtaattgtaaatgggtatcagaaaattgctgccggaaccgggtcggttactttaaagaataatactgatgaaccgaagtctgttcaggtgtttgtcgctcagtatgaaccgaatggtaaaattattaaaaatgctaagacgaaaaccgcagtgttagatggcggagcagaacaaacaattacttttgacggattattacaggatggagcaaaagtgtttgtatgggacgaaaatttaaatccttattgttctgtgtttaatcttacagcagaataagagtttagttatattttaaattgtttataagtcaaaagtcacctattggtgacttttggcttttttatataatgtatattaagatactatcttgactaaataaaaataagactggactcgttactatcacgaatccagtctttaattatatagcaatagcaattatttaattacaaagcagtaataatttaagcaaatgggttttcgccctcgtaataacatcctgcaggacggttccattctatatcagtaacgcccaaatattttactacttcaaacaagtctttagcggcgtgcttgaatgctatacctgcgtgatgaggatactgtttattgattaaaacgttgcggtagaatctacccatctcatttacagcaaatactgcaatgcttccgaatgatttcgggtcaacgtctattatctcagcattggcaatgtagcttctgagctgaccgccggctgtgctttgaagtctgaataaagttacgtctccgggacgaatattaccctctaatgttcctcttgaaacattaggctcaggaagttcaggctctagatttctcttttgtatcaactgatattttaaagcataatcggtcaataaatcacaagcagtatttccgcagtggaagcccatgaatgtgtcctttaatgtataattgctgaatttatctgaattagcttcaaacatatcttttggaacagagttgttaatatcaagcaaagtaggagctatgccggttgtgcaggcaataataaattcagttaatgctccatatatatctgtttcacaagcaacaggaataccttttgatgtaagacgggaattaacgtaacaaggacagaatccaaactgagtttggaatgcaggccagcacttgttagcaaacgcaacatatttagaagctcctttgttagcttcagcccaatcgagcaaggtaatttcatattgagcaagtctagtaagcagtgaaggatagttgtttcctgacccaagttcgtctgccatttctttagcaacagcttctatcctaggatcgccttcatgttcattaaatgaagccagtaaatcaagttcagaattttcctgaacattaacaccaaggtcaaacaatggtttaattggagcgttacatgcaaggaagtcataaggacgcggaccaaatccaattatttttaagctctttacaccaataatggcacgagcaatattttcaaactccgcaatcatatctgcaacttcatcaggcagaccaacaggatattcaggtatgtatgcttttaagttctttaggcctaagttgtaggaagcgttaagaactccacagtatgcgtcgcctctgccgtctattaaatcttcctgtgtttcttcagcggctgcaacatacatgcagggaccgtcaaaattcttgcaaagataagtttcaggaccctcaggaccaaagttgccgagatatacaacaagagcgttaactcctgccttatttacttcgtcaatagcttcaagcatgtctgtttcattttcaacaatagtctgtgcttcatatatgtcaatattcttgtccgcacaagcttttaccacatttatacgtcttttcttgctaagctcaatagggaaacagtcacggctcaccgcaacgatacccagcttaacttccgggatgttgttaaacatttataatacctccacatttataatataaaattcaatttccatagactattttaatataaaaacacggcgccgtcaacataaaaattatttattttgcaatattttcacttttatcttagctacacgccggttttccatttctatgacataaatatgatgtccgttatattcaaaagtgtccccgagttccggcattttcccgagtttctccataacccagcccgaaacagtatttgggtcgtcgtcaccaggtttttcgtccatcagtttaaggaagtcatccaaatcagtacctccgagtatttcataaatcccgtcagacagttcagaaatgttttctacaaccttgtcatgttcatcccatatttctcctacaagctcttcaagtatatcttccaaggtaagaattccgtctgttccgccatactcgtcaattactacagcaaaatgactttttgaattctgcagaaccctgattaattcggaaatgcttatagaaggggaaacatatataaccggtgaaattatttcttcaatatttccgccgctgtttttttgtattagatgaaacaggtctttttgatgaacaacacctataatattatctattgtatcccggtaaacaggaagtcttgaaaatccggattccaaaaacgtttcaataatctcttcagttgacgtatttagttcaagcgcgcacacatcaatacgcggggttaaaatatccccggcttccaaatcgttaaattcaatagcgctttttataaggtcgctttcatcagcgtcaatttcaccgccgctttgggcttcgtcaactatagtcaaaagttcttcctcggtaataccgctgtcgttttttgatttaaaaagcttgccaagaagttttttccacaatccaaacaaataatttattggagttagaataaactgcagaatcacaactattttggaaacagcaatcgcgtagccttcaggctgttcttttgcaaggctttttggtgatatttcgccaaatataaggactagtattgtcataacaatagtggatatagtaactccggcgtttccgaaatattggacgaaaagaactgtcgccaaagaagacgcgagtatattaacaatattatttcctattagaattgtagataaaagtttgtcataatccagggataaacgttcgactaaaagagcttttttattgccctcttttgcaagatttttgattcggatacggttcagagaagaataggctgtttcagtggcagagaaaaaagccgagcagccaataagtagtacaagaataataacaagtccaaaagaactgtccataatttttttgtgcgcggaggtttttgccttcggcacaactcctttccttgataaaaaatataataattgttacataagaataatcctaaatagtatatcataattggcaataaaaagcaatagcaaaatggggaataaatctttaataagtgtaggattacaatagatgtgttacaaatagaaaaaaagaatacggaaaactcataaattgtgttatagttatatcaccataatatcacagttataaaatactattaagtgtttatgtgtgtgttttcggtagttatatttctttttaatacatctattccattatatttatttattttaaaacgagaaagtcccacaatcgtcccatgaattttctctcatatacaaattgattgccaaattagtacatataatatacacaaaaagacaccaaactaggtgtctttttttaactcacctaaacgattacgcgagtttaactctgacacagaattaggaacacgaaccaacaactcgcttaaatcataatttaaagcttcacatattaagtcaatctgttctaaacttactcgttctgccatttcatgataaaggtcatttatagtattaggtcttatccctgttttccgtgcaaggtcagcttgtgtccatcgaagttcgcctaacttcctagacaataaaattctaatcattgtattgctcctcttgatatattataccaagtagtgaagcaatttatctgtgtttgttattttatatcgatatttgttattaatatatttattgacattcaagcacggcttttgaagctgtgcttttttattaatgataaattttaatataaattattaatcacattttataagaatatctgaaaaacagagtttatacgcaatatgtaacatatagtttaaaatatattattgatagaatattcacatattttatagattggaagtgaaatgctgaacatattaaaaatatgctttggaaaaacattatactttagaaaaattgaactaaaattaaatcaagagaaaatggcagagagatgttgtctgtcaccacgtcaatacacagatttagaaaatggaaaaagactaccatcatttaggagtttaattaatatcataataaatggtggcataaacataaatttatttattgaagaaattatcaaagctggatacgtacctgaggattatgttggaaaatagatattatatttttaaataaatataaataggcttcttcaattatttaagaagcctattccacttaaaacttttatatattggagttaatttatataaatatcaattttacttaaattattctcccattcaattataaaattagtaacatcagctaaaatctcatttaatattaatcttttattttttatattatacactccacaatactttatatccaaatgattttaatattgtcttattgccacttaagaagattttacttttattaaatgatagatcgacatagcaattatcacaatagtagtcggaactcctaataataaaccatatataccacttgggacatctcctataaattctccgtattgtattttgtgaaacactaacatcataccaacacttatagttattacccccaacatacacaatattcccactggaaatataatttttttctattgataaaaattatattaataatcaatagatatatttgtcttacaattaatatccataaccacataagattattttccatcgcattataccttataggtatatatagcgcatatatttctattgatagttcaattatcaaaggtaaacaattcaaaaaccaatacatatatttatacctcctaatattaaattatgtagccaacaacagaattagataatttgccttataccaactttgtgcccactgatttcctaaactatatagcaaaacataatttataagttaataagatacttttttcaaaagtaaattcattattcataaacatttaagtaaataatgatatttggttgtttagtataactccgaccacataatttaattcagttaaataactatttactgatcctccgttagctagaatccctgcacctaattatgctacagtacattgcaaacaattgttattataaaaattatatagcgaattttttctttaaaaactttactatttaacgttaacgtgcaacaactgaacttgcataatttgcttttactccgacttgcgcccatggacttccctgcatatatagtattgtataatttaataatcttgcaaatgcaaattgacgaataaacgaattattcataaacatctcactaaacttttcagaagcgtattttggaataattccccaggtgtatccacatgattccatgtaatctgagaccaacatatcgtttgccaaggttccctcaccaaatgaatcaatagtgctctgtaaacaattatttgtaaatacattatatgacccgttatctccttgatatattacactatcatcatcaagctcatgcaattctgcatttccttgaattggctctatattataaattttacgatactctgctcttaatgaatccaaaaaatctccaaacacataggtagcacaatcatagtttgatgtaatattagaaaaaccattatcggttaaaaattggtttaaaccagcattgaaatcttccagtgaattcatgtactcatctggaatgcgtattattgccgctgccttatctccccaatatgtataaaaccaatttccattatcatcttgatatatagcagatgtatgtccttgttttcctaaaggtcctaaattaacagcattgctatttgttaatattattgcatctaaaccatttggatcagttaaattgatagggtcattttcacaatatacataccaattaacgccatcttttgctgggtcttcctgagtgaatctccctatacttgggtcataatatctgtttcttaggtatatcaatccagtctcttcatcggtatattgtccgttgtatctgaattcgttgctgtctgcttctcctcctgttcctgatactaaacctccgaatgcgtcatattcatcgctgccgttactgcaaatgatgtactttccgcattcttttctattatgtttattgtgtctccgtggacgttatatgagaagtatctgctgttgcttgcgctgtctttggtctttactatttctcctccggctcctcggatatacgtctttgttccttttgttccgtattcggctattacgtttccgttgttccagatttgtcctgtgcttaatccgtttactgtctttcctattctcgttcctgttccatatttgttattaatatttctaaattttaatttataggattcataatgcatttattgacattgatatatagtattattagttactatctttgctcataataataccaaccattatttttttcatcaagtgctcgaatagcagttattaattcatgtgttggttcatttgtagcaaaataatatttaaaataagctatcccatatgctctaatacctacataatttttatttaaattgcctcgataaaataaaatagaatttcctcttttagtaattgatttaaatttatttttaaaaattatgttaattttttcaagtgataaatttattccatatttatcatttaacacttttcctatatcacttacattatctttgtctatataaatatcctcagtataattcattagttcatttgctacactttcaaaattgtcacgatttgtttcatatgcttttgcaatatttttataattatccaaattactatgtaaaaataacaataacactaaaaccaaaagtgcaccaaaaataaacgagataacatttttcataataattaccctttcttcttgttatataaattaaatcctttttgtatagcagctttatcttctggagtatcagcagagtttttaataccgttccatcctcctgcagcatagtctccaccccaatataaaacagtttcactaaatccaatacatcttcctaaatatgcatacataatattgcccatctcctccgggcttgaatattctccatataatattactgtagaattaaatgagccaggatatgatcctccaaaagttcgatcccatgattcttgacgttttatatcccaatctcctttatgatttactttattataaaatgtaatttgtttatctccttgccatttttcatctagcatttgttcagaataccacaactgatcattaaacattttagtaacatcaaaatattgtgctcctgttgcttcagtaaaaatggttactcccctgtctatatctccctgtgttctatatattaatcctaaactttgccatgtagttaacccaaccactccgctaaaagctccatcattccataaacccctatcatttttatatgcatttactgcatttaaagttttttgtccaaaatatccatctctatcattggtatttaaatatcctaaatatgccaactcattttgtaaagcaattacatcttcactatatcccatgccataatataaagatgtattataatcaaataatcccaatggatcaattaaattaacaggatcatttccacaatatacataccaattcataccatcttgaacggggtcttcctgagtaaatctacctatacttgggtcatagtaacgattacgcaaatatatcaatccagtctcttcatcggtatattgtccattgtatctgaatgcgttgctttctgcttctccgcctgttcctgataccaacctccgaatgcgtcatattcatacgctgctgttactgcaaatgatgtgctttccgctttcttttctattatgtttgttgtgtctccgtgggcgttatatgagaaatatctgttgttatttgtgctgtcttttgtctttactatttctgctccggctccccggatatacgtctttgttccttttgttccgtattcggctattacgtttccattgttccagatttgtcctgtgcttactccgtttactgtttttcctattctcgttcctgttccatcatatgcgtatataaaatgtactctagggcaagtaattacttgccctaggttaatttattaatcaaaatcctccatatataaaatgccaccaatatggccatattacatcagatgcacttcctgtacttgaccatactgtttgttcccatttattaaacttccactcattattttctttaacaaaagacacaatattaccaccggctctatgttttgatacatagtatacctctgcatattcatttgaataattcaatacctttaaataatccagttctcctatcatcgtcttttctttatatatttctccaaactctgaaccatgcattattgttaatacttcgcatcttattaatgcacttccccaatttatcagaaaatatataattggtaataatataattattgtcactgctattttaacatactttttcatagtttctccttttttatattcctaataaatcacgcatataataatattcatttcttgcatttattccaaaaggattaggagatggatttgaatgtggaggatttatttctccttgattattgagtgtagccaacattgctgtgtcttcatctataaccgaattcagagtaactatttagaaaatagatatttttatgtaaaaacaataaaacttaccatacttttattatttctgcattactcttgcgtattaaagttgtatattctttttttgcaaaatccaaatttatttttttgtttaatttaaataacttgtcaatgttaattttactacattgtctaatctggaaaaactcatcttcattttcaccttcaattgcaacaccttttgcatcacttatatatgtatatgtgccattttcgtaatcatttttatgccaatattccattatattatttttattagatctttctatataacaattaataaaaatacttaatgcgattttagaagcgcaattttcatcgacataaggtgaaacctcttttttatttaatatgcacttatatatctttccattatcattatcaataaaaattgataaaccttcttctcttaacaaattatttaaattgtaatttaatactttagataaaccaaaagaaaaaaatttacttttactttttgcgtttattttatatactttttttccatcaagttcttcattatttacataaaaagttaaattatcaaaaatatcttcgtttgtcatatattctccacgcattttcacttctttttttattgttgaaattataattgattttccaatttctaaagcggtttttttatttattttataatctatatttttacttccctcgtaatcaactatcttctgaaaatcataatatggagttatatttataatcgttttacctttaacataatcaactgttttatgcttatcatttaagtataaattgtttatagcgaatatatttattattaaaacgctaataaacaacaacattacaaatattatatattttttcattttaatacccccttattgattttaagtaataattgtattcaatctcatcataaaaccaattccatttatttctaaaatatacatctgcatttctttgttcactatatgttagatgcctaaaaccataatctgaacctacagcctctaattgatagcctcgaccatcatcataatcctgaattttactgatatcaacaccatcactatattgtgattccccaacaacatataatatagaataattttgatcaatagctaaatctaaatcttgattagataaacggttagttacagtatgagaatgcactgcaccaacaatatattgcccttcattaatatgagtatttaataatgttgtttgaacataatttggttgaccatcaacacattcagtataagaatagtaaggagtattatattcatcatatgccaaatatataagcgaagcatgttcaatcattgagtactgagttatcccataataattccaagcccagtcaattgctgcttcatctggagtagcaaaacggtcacctgctacagtaccaaatatatcatttaaattaacggggtcattagcacaatacacatataaattagcactttgaactatagcatggtaatccggtatctttacttctccttcttcaaattgttggtctccatatatcatatttcctggattccaatatgggtcttcttgagtaaatctacctatacttgggtcatagtaacgattacgcaaatatattaatccagtctcttcatcggtatattgtccgttgtatctgaatacgttgctttctgcttctccgcctgttcctgatactaagcctccgaatgcgtcatattcatatgcttccgttactgcaaacgatgtactttctgcattcttctctattatgttcgttgtgtctccgtgggcgttatatgagaaatatctactgttgcttgcgctgtctttggtatttactatttctcctccggctcctcgtatatacgtctttgttccttttgttccgtattcggctattacgtttccgttataatttttttatatcctatttaagacaccatatgatatcgcctcattttgatgttttggtttgtgcgcaatgagcgacagcaacatttttatatcgtcacagccgctcattatttctttctttatttaaacatatcttctatggctcttcaattatgtttactacctcccattttccatttattttttctattttccattttgataaaatgttccatgctccatatgttcgattgttatccttatcatatccttcataagtatataacatccacatatatcctttattaaagttatgaagtacaaataatctatttaattttacatcaacttttacagtaccaaaatctccttttctattgtattgatccaatggcgtattctgagtaattgatttttcaacatttccgctcataatattttcaacattgttcacaacagaatttgtattcaaaaaaatagtaagatacattattagaattataacaaacgctatacataagctatatctaaaattcatttttgcgcattccttctcaattattaattaatatatcctctaacagcttcatctcgaattctaataatatatactaattcaccgcccaatctatttgaaattgcttcatcaaccttttcatttgtatgagctgagtaatatatctcaccattctcaacttttgttacaatagctgcatgatgtggattagctccatcttctccggcccaatatatcaaatcaccaggttgtactccacattttgcaacatcactgacaccctcaggagtccaaattgttaatacatcaccattaatataaccattatatggattgctgaaaaattcaaactgagctcttgctagtcgccatggttccgaaacccaccattcatacttatcattatttgttggttgccaccaatcatctgtattatatctatatgaaaaccattgagaatttttcaatattccaccagcaagcaaacattgagatacaaaattagcacaatctgttcgataattataaaattcctcatttcttccaccaaaatatcctgcatttccatattcacgagcataattaacagctgcccatctattatatagacctgtaggatcaactccattaacagggtcattagaacaatagacatataaattagcactttggactatcgcataataatccggtatctttacttctccttcttcaaattgttgatctccataaatcatattacctggattccaatatgtatcttcctgagtgaatctacctatacttgggtcataatatctgtttcttaggtatatcaatccagtctcttcatcggtatattgtccgttatatctgaatgcgttactgtctgcttctccgcctgttcctgttactaaacctccgaatgcgtcgtattcatatgctgctgttactgcaaatgatgtactttccgcattcttttctattatgttcgttgtgtctccgtggacgttatatgataagtatctgttgttatttgctctatcctttgtctttactatttctcctccagctcctcggatatacgtctttgttccttttgttccgtaatcggctattacgtttccattgttccatatttgtcctgtgcttactccggttactgtcttccctattctcgttcccgttccgtcatatgcgtatgatgccgtcttattcgtatctgtataactctttagcctattaaatccgttatattcgaaactttcatacttttcttcatatatttcatatgatgaaccttcgggtggataatcatcgtaaaatactactgtatctcttgtgatcatatttccatttttgtcatatgtgaatgttttatcttcattcatatattcctcataatcataagaacttcctgtcaacctgttattattatcataataatactgcgtataaccttctccttcttcatacgccggtcttggtcccgtccaaatcattagtgacacttcatcctttgtttgttctttgcttattcgatttcccctttcatcataactatatattgttgttattttttcatcttcattgcttttcttatttagctcatttacttccgttttcaacctgccggcgctgtcgtaggtatagccttttgtctttccgaatatgtccgtcactgacgactggttcccgtccaggtagtagctgtagttatactccgagtatgttccctttatgttttgcagcgggtctgccactgtttgattgcttacctttttcggcaggttgctctcattgtactcgtagctcgttaccattgtgtttccgttggttttcttttctgtcaggttcccgttttcatcataactatacactgccaccagctcgttttccaggttatcccttacctctttcatctttcccagatagtcatagctatagcttatgttttgacttactccgttggttgagttcagtatcagtcctgtttggtttccgtctttatcgtatgaatagctcagcgtttctcctgttgtgcggctttctcccgtcacttgtccttttctatcatagctgtaggttattgtggccgcttcgtttgctatgctcagcagcgctgtgcttgtgtctgcgtatgtgtaggttgttgtctccgtttctccgtctctttcgcttgttgctgacagagggttgtttattccgttatacacatttgttgtcactgttccgtttttgtctgttttgcttacaatatttccgttattatcgtatgtataactttcactgtatcccattgggtctgtgctcgaaatcagtctgttttggctatcatactcatatgttgtgcttactcctccttctccgttcactgaccctgttatcatctttgttatgtttccgtttccgtcatactcatacaatgtctctcccggctcgtctgtgtatgtttttaccagtctgttcatattgtcgtattcataatacacatttctgtacgtcaacgcttctcccggcttattgcttgttatgctttcttttattacgtttccgttattgtcataactgtagctttttatgctgtctcctccgtctattctgctctttacttctgtctgtcttccaaagtcgtcatactttgccgaactctcatttttctttggatctattgtctttacttcctgacccagcatgttcttttccactctggtagaattatttgtatgtgatattatggtgatataactataacacaatttatgagttttccgtattctttttttctatttgtaacacatctattgtaatcctacatcaaatagattattggacataattgtttattgattttaatgcaaactgagtgtataatggtatttgaattgaataagaataaaaaatttttttgaaagcaggatgtttatatggtcaatgctgataacaatctttacaatgagtttttggaaattgttgaggatttgatttatacacccgagtttagaaaattagacgagtgcagtcatcattacggcgtgagcaggatgcagcactgtataaatgtagcatattatagttttgttgtttgcaagaagttaaagcttgattacgttgccgctgccagggcaggattgcttcatgatttgttttactacgattggcaggggtcagggctaggagttgcaaagcatgcgtttctgcactccagtatcgctcttgaaaatgctgagcagttaacagaattatcaccgcttgaacgtgatataattaaaaatcacatgtggctgtgcggcaagatgtggccccgtcacagagagagttatattgtttcggtagctgacaaggtttgcgcagtatgggaagccggatatggagttaagtgcaaggtagcctgcgttatggctgagtaaggaatatggttaaggaagatttaaatcaaaagagacatgaaattcagaaagaagaacttgagatttataacttaaatgaaaagatagttgataaaatgtcgggctcggattctgaaaaagttaaaaagaaatttttggtttaccaaatattattttgtctgatggcaattttcagctttttgatattaataaatcagtttcttggaaatataagttacataaagcagccagtgtggctgataattgaagcggctttatggctgatttttctcgctgattatattgttcggctggcggtttccgatgacaaaaagcagttttttacacggaatatattagattttttggctgttctgcctttgcccgggtttagagtttttaggatttttactctgttcaggatgatgtttgccgtgaaaagggtgcttagagcagtacacatagttatgaattcaaacggatttttatatcttttaggggcagttgtggtgtggatgctgataggctccgcatttttgtatcattttgaaaacggtataacgatgaattcatactttgacgcgttatggtgcagtattgtgacggtatgtactgtcggatacggcgacgtggcgcccataactgcaggaggaagagttgttgcagtgctgttgatgatgacaggtataggaagtataggaatggtgaccagcaacattacagcatattttgttgtcagggcaaagaaacgccgtgtagtgattgacaaaaatcaaattttagatttaagcatggtatcaaaggaaaaatatgaaaagattgccgattacgcaaaatatgttctgcagcaggataataaagatatagattagaaaaatataaaattaagttatgagaggagaaaaacttatgaaaaagttaatggcaatagtgctgacaggagttttagcggtgagcgttttggctgcctgtggaaacacggataaggataatgctgaaccaaccaaagcgcctgtatcaaactctgtaaaatctgaagaggataaggcaactgcaaagcccgacactgataagaaaacagattcagacaaggacagcagttcggaggaaggaaatacttccggtgacaaagatgatgttaaggcaaaagccggagacaaagaagatgcggacgcaacagccccccctaaacttcagacagcagatgaagccgctaacgacactactactattgataaagagatagcggatattgaacagctgattattgacggaaactatgacgacgcgttaatgcagattaaggctcttaacacaaaaaatctaactgacgcggaaaaagagaaagttcaggagtattacgagaaaatagaagattatatttcaaacggacttactgactagcaataaccaatgaggctgtaaaaaattataatccagccgtaatatagaataataaatcataaaaagaccattgtattagactataacaagcctcttacaatggtttttttgtaaggatttttatagcgcaattttaattataaacacaattggatttctataaaaagaataaaatatttaaaacattaagtttaagatttaggtagaaatttttatttaaattttaaaatagtttttggttgtaactttttattactagaacttttttaggttgtttttaataagaatatgtgaatgctgcaataaattggatagaaattttaaagtcataatatgataaaaaaatatttaaattatagaaaaatgcggttttgcaagcgtaggtaggtgcgattgtacccccgccttacaggagtgtgttatacaaactgccttgttttcattaactgaaaagtcaataaaagactagacaaaaatttataggtgtttcttggtgaacatcggcagggtgtgcgtaagcacacctcgttaggtgagctgtcatttcacgcgtagcgtgaacatacttataacaagtttgtcgtaatcctttttaataataaattttaaaatttctattcaatttatttcagactatccaaacatgattggatttctgaaaaaggaaagaaaatttataacactggatttcagatttaagcaagatatttagtttattatgttttaaatagaaattgttgggtatactctgattgttaattgaattattattagttatatttattctgtaaataaaataaattcataacaaaaattcagctgaaatatttctatttggctaattaagactaaagaaagaatgtatatgtataataagtatatcatacgtatgtataattaaaaatttgtaactaaatttagcgtaaaatagaatatatttaaattattaagtgatagtattttttgtcgaaattgattttttgggaaatttataaaattttccttgacaagtaacaatggttgtgatacaatctgtacataggtcatgattctcatcctgtgaatcaatgacagaaattttaggaggtattgtaatatgacaggaaaagttaaatggtttaatgcagaaaaaggattcggtttcatcgaaggcgaagacggaaaggacgtattcgttcatttctctgctataactatggatggttacaaaacacttgatgaaggtgttgcagttgagtttgacgttatcgaaggtgctaaaggtccgcaggctgttgacgtaaagcttgcgtagtcttttaatatattttgattgactgaaagattaactaagaaattatagctgctcctgccggggcggctattttttaagatttaaaacaaatgataaagtaaaataaattatagttggaggaatacttatggacaagctgattaaagcgattactaaagatggctttctaagagtacacgcggttgaaactactgaaactgttaacgcagctcaaaaatttcacacgctttccccggtctgctgtgccgctcttggcaggctgatgactgccgggctgatgatgggcgccatgcttaaaggaaaagaaccgtcgctgaccctgcaggttaaaggtgacggcccaatcggaatgatggcgtctgtatctgattctatgggcaatgtgaaaggttactgtgctaatccggttgtggatatttctttgagagaagacggaaagctggatgttggagctgctgttgggcaggggatgcttggggttataaaggatctcaaaatgagagagccgtatattggtcaggttccactccaaaccggagaaatcggggacgatattgctttttattatatgcagtcggagcagactccgagcgttgttgctcttggggtgcttgtggatcgtgattattccgtaaagtgcgccggagggtatattattcaggtgatgccggaatgtgatgacgcgacgcttacaaaacttgaaaattctattcaggggcttatgtctgtaaccgaaatgctggataagggtatgagcgtcgaagaaatgctgaaatatgttatgcttgggtttgatattgagatattggaaaccatggatgttgggtataagtgcgattgttcaaaagagagaatggaaagggcgattgtttctttgggcaaaggtcagattcagagtataattgatgagaccggtgaggctgaaatatgctgtcatttctgcgatagacggtacacattcggagaagaggatttgaaaaaatttcttgaaacggctaaataaatataccttaaatcatttgacaatgaaaaatccttgtgctataatttacctattaatatatgtgaatatatttgcaaatataattttaggaggtttttgaaatgggtatttcagagaagtttacattaaaagataaagttgctctggttacaggcgcttcttatggtattggctatgctattgccagcggatttgccgatatgggcgctaagattgttttctgtgatattaagcaggagttcgtggacaagggtctcgctgcatatagtgccgacgggattgacgctaagggttacgtttgcgacgtaactgacgaagctgctgttcaggaaatggtaaagaaaattgaagcagaagttggcgttattgatattcttgttaataatgctggtataatcaagcgtatccctatgtgcgatatgacagctgaggagttcagacaggttattgatgttgaccttaacgctcctttcattgtgtcaaaggctgttattccaagcatgattaaaaagggtgccggtaagattatcaatatctgttctatgatgagtgagctcggccgtgaaactgtatcagcttatgctgctgctaagggcggacttaagatgcttaccagaaacatttgttcagagtacggcgagtacaatatccagtgtaatggtattgggcccggatatattgctacacctcagactgctccgcttagagagaagcagccggacggttcaagacatccgtttgaccaattcattatctctaagacgcctgctgctcgttggggaaatcctgaagaccttcagggacctgccgctttcttggctagtgaagcttcagattttgttaacggacatattctttatgttgacggcggtatcttggcttacatcggcaaacagccgtaaaccgaaatttgaatattttttgagagacgtttatcgtctctctttttttatgtatggtaatatttcgtttgaaaataaagattgttaaaaaaatatttatttatctaatataaaaataaaaatttgaactcgactgatattataaaatgctgtatactaaaactcatagtgtgtatttttgaaattatgacggaggattgttttatgtttgtgggaaaattaaaaagacgtattgtgaaatcagttcttggattacttgccattatctgtgtggtgtcagttatggcaatgtctgttactgtttcagctgaggagaatttattggcgtttcccggcgctgtaggcggaggaaagtataccacaggagccagaggagatagcaatatttcagtataccatgttacaaatttgaataagagcggagcaggttcatttgctgacgctgtttcacagtcaggcagaattattgtttttgatgtcagcggaacgattgaaatcagcggaacgctgaaaattaagaaaagcaatctaactattttaggtcaaacagcgcccggagacggtgtgactatttcaggcggggatttacttcttgacagtggagttgaaaacgtaattataagatatctgcgcgttcgccctactgataaaaacggcggcgaacctgatggtctaggcggaagatataataaaaatataatctttgaccactgcagtctttcatggtcggttgacgagcttattactttatacgccggttcaaccgaggacacaaagaatcagacaggaagaaatattacagttcagaatattatagcttctgaaagcctggctatgtcaagccacgttaaaggcaaacatggatacggcggtatcatcggcggaacgaactatacattttataataacttaatggctcatcacgacagccgttcaccaaggttggacagagagctggggtctactgatattgccaataatataatttataactggggacagacaaattcactttatggagcggaatcatactctatacataataaaacgcaaacgccttcaaatgtaaatatagtcagcaattattatatgtatggaccgagtactaagagcaatctgagaacacgaatttttgacgtttctaatgacgcaaaggttaagccgtactctaatttttatgttaacggcaactatgttttcggaagccagcttgtgacagcagataataaaaaaggtttgaataatagttcgcttgcaactgtattagaatcaccggttgatatgggcgaatattctgtgccttactcaacttctgaggaagcatatgataagattttatctgacgcaggagcttctctgccaaaaagagacgctattgatgcaagaattgttgacgatgttaagcatcagacaggaagaattattaataatgcggatgagatagccgggttgataccgacagaagaaattcacagaacttttgagatacctgaggactggaaagctgaaaacaatatgggcagcgcttctgaaaccgatatagtggaaaatggggaatataagggatatacctggatagaagcatatgtaaatgactggacagccaaagcttctaagcctgctaatcctgagattgtcgttatgtcgccggctattgcgtctgtaaataagacggttaatgggcttactgtaaataatggaaattggactgttgttaaggatactgaaaccgttaattatcatgcggcagctacgccggttcaggggactgaaataacaaaatttgaactttacgataaaaatcaattgctgaaaacttataactcggctgaaattaatgatgatatatctttagagccgggtgtacatcacttgaccagccgtgcttataattctaatggagaaaagacacagagcacaacagctatagtatatgttgtcggaacagccgaacccggaagcttttcatatacgcagataggaaagaactgttctttcaataatctagccagcgcaactatggataataacggtgtttatactatttcgggttccgggcagataactacaaacagctcggataagtgcgcatatatgtataaagaagtcaagggagattttgatattattgtcaaagtaaaggagatacctaagtttgaaaataaacaggtttcgggaattatgcttcgtgagagtttggagccaaactccaggatgcttatgctggctgatggttgggaaaagtacggagaaaatgtaagtgtatttgtcagaaacaaagccggaagttcatcaaccagaagttatttcaaaaatgcttccggaagcgaacttgtaaacggtgataagtacgataccggtgcagccgagtatcacctgcctaagtatttgagaatgaaacgaagcggtgataaacttacaatgtcggtttcggacagcggaatagactttactgataatccgcggcagcctatgagttttacaattgacggtctatctgatactgtttatttaggaattgcgaatgattccactcagggaacaagtgttaaggaatattactcaatggcaaaatatagtgatatttctattaacggcgtcagcgatgttcagagtcaggagtctaaggttcctttccttgatgaagagtttgatttagatacttggtatggcgaatatgtttttaacgatgataaaaggtcagaaccaatatcaggaaacagcggttaccttttgtcaacttggtcaaacgccaacaggaattttactgctcagtcaaaaggtatagtaaccgcgtcatttgacttcttagaatatggagataacaataaaataggcagcgctgaatttattttgagaggaacaaatgcggataatgaacttaaagagatgataaaagttatagctgagagagaccaaacatttaaaataggcgataaatctatcggtgatttagttcttgatatggatgtttggtataatgtcagcattgaattgaatttctttaccgggaaggcaaaggtttctgtatatccttatacggagtatgacagcacagaaggaaaatatattctatctgaaaatggggctgaggccgagactgattttgataaatcttatttattgagaggaatacgctttgttagaaacggcggaacaatgaagtattatgataatgtttccgtcagcgctgaaaggaatgaatcgtacgttaaagagaataatggcaaaatggatgtatttgctatggaagatgcaaaaatgtatgtggcttggtatgataaggatggagttttgataaatgctgagacttatgatatacctcagaataaggaaatggagtttgacttgccaaaattgactaacggtgtttcagagaaagcggaagttttcctttggaataataatcaggagccgttatgtgagcagttgactgtagagtaagtaatataatatttatagaattgaagtgctgataatgaaaactaagttaaaaatttgtgctgctgcactgctggcgtcggttgcgataggcgcaacagtatatgctgctaatttgacaaagaaaatagacgtcctttatgatgatataagaatatcgtcaaataatattgagtttatgccggttgatgagcagggcagtcaggtggaaccttttatttatgagggaaccacatatctgccggttcgcgctgtttcggaagctttaggtaaaaatgtttcatgggacagtgagacaaaaactgttatggtaactgataatgaagatattgaatattctaaaatagcaatcagaaacttttttaaattgttttctgaaaaacggtatgatgaaatgaaaaattttacttcaggctcagttgccggatatgagttttcagaaggagttttcggaatgaaggaagcttctttggacggtataatttatgcaggaaataaagaacttgaaaatgaaaataaatttgcttttatttgtcattttaatatgacgcctgctgagaaatcagtatatggcagcagtgaaagggaaatcggattttttgtagaggtattaaaagacagagatgaatataaaataaatgatttttataccggtctgtaatttagaaagatataataaacaaagccgcgcggataagtttcgtgcggtttttttaatattttttgtttaaattattgagtattataagaaaagcgtacgtttaacaaatttaatacaggcgatgataatttattattgttatcgtgtccgtactgcagtttagttaatatatagttggtaatcaaaatttattcgaaccgattaatatgctgcagtctgtatcacagaataacatattttattatattgaatattaatgtttcttaaatcgttacaaatgaatcagaccattatttaaaattgcatagtataatcaagataaaacactaatatcttgatttattaatattttaataccaaacttaattattaatttatattttgaatttaagtaagattgttcaataataaatgaatcgaattttatataatacagggagccatttcttgtaaatattcttgttatattttcttttgcttgcattgtcaactaatagcaaatttatggttgacaataattcttgagtatgttataatttggaaaacatttaaggaggaagtaatatgaaaagtaacacattaactattagaaaaatgacgttttgcgcaatatttacagcgctgattgcggtaggagcttttataaaaattccggtgccgccaataccgtttacacttcaaacaatgttcgtagttcttgccggactaatgcttggcgggaatatgggcggcatcagtgctttgttatatatgattttaggtcttataggaatcccgatttttaccggtggcggtggaataggttatgttcttaaacctacgtttggctacataattggattttgtgttggcgcatatgcaattggaaaaatcagttataaaaatggtaagctgggcggatatgccagaatgttctgcggagttttagccggattgggaattatatatggctttggtataatctactattactttataacaaattttgttacttcaagttatccgggcttttggtttatgatactgcattgtttccttatgacaattcccggtgatttaattacttgtgctttagcttgtttgctggcaaagagagtgcatccggttaccggcagatacatatataaaaatgcttaacttaaaaattatcacaattaaataaaactaaggcttgtggaatataacccatgagccattttttaataattaaaaagcatataaaaatttatttattagaccgataaaatatacgttttttcggaagttttacaagtaaaaaaatggtagctataaattttttctttaatttttttattgtgattttacacagaaaatttgtcaattttttggttattttaacataagttaaaaaattatgtagaatgttaaaattttatcagtctgactcttgacattaaaaaatatcatgatattattatatttggatttcactggttgtttgaaatatattattaaattatatttttgatacaaactgtgaatgtaaaacatagaaaataactgaaaaacaattacttattataaagacattttaggaggtataatatgtctaacacaaaagagtgcgataagttcctttcacaagagtatttggaaaagatggacgcttattggcgcgcaacaaactatttggccgcaggtcagctttatcttcttgataaccctcttctccgcgagccgcttacaatggaacacataaagaaaaaaatagtaggtcactggggtactgttccgggtcaaaactttgtttatactcatttaaaccgagttattaaaaagtatgatcttgatatgatttatatttcaggacctggacacggcggtaactttatggttgccaatacatatcttgaaggttcttacagcgaaatttatccaaatatcagccgtgatactgaaggaatgcagaaattgtttaaacagttctctttcccgggcggtatatccagccatgttgctcctgaaactcctggatcaatcaatgagggcggagagcttggatattcactggctcatagctttggagctgtttttgataatcctgatttaattaccgcttgtgtagttggagacggtgaggccgaaacaggacctttggcaactgcatggcagtcaaataagttcttgaatcctgttacagacggtgcagttctgcctattatgcaccttaacggatataagatcagcaacccgactattttctcacgtatttcacatgaggaaatacaaaagttcttcgaaggctgcggttggaaaccgatttttgttgagggcgacgacccgatgacaatgcacaagcttatggctgaggctcttgattctgcaattgaagagataaaagaaatacaaaagaatgcaagagaaaataatgacagcacgcgtccgatttggcctatgatagttcttagaactcctaagggctggactggaccgaaagaggttgacggacagaagattgaaggttcgttccgtgcgcatcaggttccaatcactatggagaaacctgaacatcttgatcttcttaaagaatggcttctcagctataagccggaagaactctttgatgaaaacggacgtcttatacccgaactagaggaacttactccggacggtgacagacgtatgggagcaaacccgcatgctaacggcggtttattgctgcgtgaccttcgtatgcctgatttcagagaatatgcttttgatgttccaaaaccgggcgctgtagaagctcaggatatgatagaactcggaaagtttgttcgtgatatatttaaactcaatgaagatagtaaaaacttccgtatttttggccctgatgaaacaatgtcaaaccgtcttggcgctgtgtttgaggagacgaaccgtgactggaatgctgaaaagctggaatctgacgagttcctggcaagcaacggaagagttatggactcaatgctcagcgagcacatgtgcgaaggctggcttgaaggatatttgctcaccggacgtcatggattctttgcaagctatgaggcgtttataagaatagtcgattcgatgttctcacagcacgctaaatggctcaaggttacatctgagcttccgtggagacagaagattgcgtctcttaactatatcttgtcatcaaacgtttggcagcaggatcacaatggatttactcatcaggatccgggatttttggaccatgttacgaataaaaaggctgatgttgtacgcatgtatctcccgccggatacaaactgcttactttcatgttttgaccactgtatcagaagccgtaattatgtaaacgttatggtaacgtcaaagcatcctcgtccgcagtggctcactatggaccaggctgttaagcattgtacacagggtatcggtatttgggactgggcaagcaacgagcagggggacgaacctgacgttgttatcgcatgctgtggtgatacaccgactttggaagctttagccgcagtaacaatactccgtgagaatatgccggaaataaagattagatttattaatgttgttgacttgatgaagcttcagtcacatgataaacatcctcacggattgacagatacagagtttgatacattgtttacaaaggataaaccgataatattcgctttccatggatatccgactcttatccatgagctgctttatcatcgccgcaaccgtgacttatatgtttgcggatatcaggaggaaggaacaatcacaactccgtttgatatgcgcgttcaaaatgaaatcgacagattccatttggttcagcaggtaatttatcatctgcctcagcttggcaacagaggagcttacttggttcagaagatgaatgataaaattgttgaacacaagcagtacattgcagaatacggtgaagatttaccggaaatcagagactggaaatggtctgaataaaatttataagttgaaataaaggctggatattccggcctttatttttttgtaatcggaaataactctggcagcatatttgaagcttaatgagttttacaattataagaagataagttacttgtaagtataaaatattaagattattttgatgtttgaaaatattttgttttaagttattgaatttatagtataaatcaagtatactcatatcaagggaggaaaaatagatgacggacaataattttaagataaatattacttctgaaaaaggcgttaatattcaacccaacatgtatggattattttttgaagatattaactatgcggcagacggcggaatatatgccgaaatgatagaaaaccgttcttttgaacagataatgcacaacgactgtgatggaggtacaaaggaaacttatagaagcccaggatatgcctggagcgctgtcgacggcgttatgcattacaagacagagaatgggttaaatgaaataaaccctcattaccttgagttttccggacgcaagtttaagaataaggcctatgaaggtatgtatgttgaagccggaaaaagttataaagtatcattctacgccaaagcagacacatataatggaacggtatctgcttcggcggtaaataatggaattgttgctttcagtggaataatagcagagaacgtcacaggtgaatggaagaagtacgaatcaatattgactgcggaagtcagtatacgatacggtgactttgtgatttctttagaagatgtcggaacggtttgctttgacatgatttctgtaatcccttgtgacgctgtgtgcggagtgttcaggcgtgacctggcggaaatgcttaaagagatgaagccggggtttctcaggtttccaggaggctgtgttatagagggatgggatattgaaaatcggtatcaatggaaacatacagtaggtcctgctcaggagcgaactcaaaattggaataggtgggctgtatctaaacggccaaaatatttagattataatcaaacatatggtcttggattttatgaatattttctgctgtgtgagtatcttgagtgcgaccctttgcctgttttaaatgttgggctttcgtgtcaatatcagggaaaagaaacggttccggtttatgctgaggattctgagaaagatataggtgtggagataaacggtgttatatacacaacagaattttaccagtatatacaagacgctcttgaccttattgagttttgcaacggcgatgaaagcacgctatggggcggattgcgaagttcaatgggacacattgaaccgtttaaccttacattgctgggtgtgggaaatgaacagtgggaagctgacgggaatcagtggtatgagagatatgaggagtttgagaaagttatacattccgtgtatccggatataaaaattatatcaagtgcaggaccaagcccggatggagataattttgacagcgcatggaaacgtataaaaatgaatatggctgaaaataccggattcacatatgcggttgacgaacacttttacaaacccggggaatggtttttaaataatgatttaagatacgatggttatgataggtcaataaaagtttttgccggagagtatgcggcaaagcaagatgggaacacactatattctgctgtgacggaagcggcgtttatgacaggtctggagagaaatgcagacgttgtatatatggcaagctatgcgccgctgttttgccgcataaattatatgcagtgggaaacaaatatgatttggtttaatgacatgacttgttatggaacccccaattattatgttcaaagcatgtatatgaacaacagcggagattatactttgaaatacagtataaccggcagtaatgataaaaattatttatctgtatgttatgataaaaatagtaatgatataatagtaaaaattgcaaatccggctgaaagggatattagtgtggttttggatttaagttctttcaccgaaactacagaatttgaaaactacgctcatattgaaattctcaccggagaaagcgtcggttccgaaaactcaattgataatccccaaaatatagctccaaagcgttcagaaataatattgaatgataatataaaaattccatctttgtcatttgcagtaatacgaatacatattttaaatcaatatttataataaaaagttttttaactgtttcgttttatgctgaaaagataataaaaattttagactgaaaaaatatggatgttttaagattaaaatattctacaggtgttttatcaacgtatagagaattgaattatgaaaaatctgaatattctataacttttaataaaataatttatttgatttctgattaatatgtatattagatttaatcagtgcgtgttcagacgagagctcacctaacgcggcgcgttttacgcgccctgccgaagttcactgatgcaatatttaaatagtaaataaagtcacaggtttataattaaaaatattttttatactaatttaaatttgttgtacaaataatgatttgattctgtgacttttaactgaaatatgtaccggttatgtatattgcattatatataactagtataaaattgtaatatgtatttataaagtttgaccgcattatgagtatcccaaataatgacattattagtaatgataaaatgagctgatttgtataatacccatcttataggttggagaatagttacagcttagttaaagtttctaaaataatgacattaattaattcaatcataaagttatagcaatttaatttgaaagccatatataataggtttaataaattattgagtatatataaaataaggagaaaataaaatgcttaaagttaaaaaagctgttagagaagagattttcggtgatgaccgtgagtttgacagcccgcatgcgccgacggtactgccgcttaaaaataatgatgtgcttgcggcgtggtttggaggcaggtttgaaaaggacccggatactgctatttggactgcaaagagattaaacggcgtgtggcagaaacctaaaaagactgtggatgttatgaatattgctgcttggaatcctgtgctttttagactcaataatgatagaattattttatattttaaattaggctctgaaataccaaaatggcacactgaatacgtatattcagatgatgagggcaagacttggagcagcccgaaagaactcgtaaaaggagatataggcggacgaggtcctgttaaaaataagcctatatatttgtcagataacaagactattcttgcgcctgcttcgcttgagggggattcttggaactcgtttgcagacatttcggatgataatggtgaaacatgggaaaagagtgagtttgtccctatccgcagaataaatccaaatgagcggagaattcgtgacagggtatataacaagactttttgttttggaaaaggtattattcagccaaccatttgggaagatgacgaaaatattgtacatatgctctttaggagcacaagttcaaggatttttaaaagcgattcgtatgatatggggagaacatggaacttagcttatgacacggggcttcctaacaacaatagcggtattgacgctgttaaacttccgaatggaactttagttcttgcatataaccctagggaaaatataccgggaatgacaaaaggcgcaagaacgcctattatattatcatattcagacgataacggaagcagctggaaagaactttatattcttgaaaattgcgacggtgcatttgcgtatccgtcaattgtttgcgatggaaatgataaaatctatgttgtatatagtgaaaaccgggagaagattattttttggaatattgaatacgaagagacagtcaactaatcggaggcagctatgaaaaaggttgattttgataatgaatttaaaaatcccggttcagagtatcgttcaattccattctgggcttggaatgatgagcttgatactgatgaaatcagaagacagatacgtgaaatgaagtcctgcggtataggcggattttttattcattcgcgggacggtttggagactgaatatttaagcgataagtggtttgaatgtgtgtctgcagctgttgatgaggcaaaaaagaatggtatgttttcatggctttacgatgaagacagatggccgtcaggaacctgcggcggaagtataactgcaacggataaaaacggctgtaaggggcttacgcttgaagtatgtttttctgttcctgagaagatagaaggaaatgtactcgtattatataaagcagaagttcatgaaatggaaatttacagtcttgaaagaatatgtaatgctgacggcttaatacttagtgataaagaggctttgctgattgcgagacttgaagtcagcggaaagtctgaatggttcaacaactccgctcctcctgataacttgagttttgatacagtaagtgattttataaacaatacacataagatatataaaaaggcggtaggcagtgaatttggaaagacaattcccggaatatttacagatgagcccagcctcgctgacaggcacgcatcgtttaatccaaatcgaagctggataccgtggactgaggaatttgagaaatacttttttgaaaaacgcggttatgatgttttagatatgataccatacttttattttaatggtgaaaagagtgcaaagataagacatgattactggcgaacggtctcggaacggtttaaggaagcctattcggttcagattggagattggtgcagagaaaataatctattattcaccggtcattttttgcaggaggataagatgggattatcctgccgtgtgaatggttctgtcatgccccattatgctgctgaggatattcaggcgattgacatgctcactgaacgtacagaggagtatataacggttaagcagtgttcaagcgtctctaatcagctggggcgcggggcagtgctatcggaaatgtatggatgtaccggctgggatttcagttttgagggacagaaatgggtaggagactggcagtatgcgcttggagttaatcagaggtgtcagcacttggcgctttattcgcttagaggctgccgcaagcgggattatccgccgagtataaactgtaacaccagctggtggaaggaatataaaacggtagaggattattttgctcgtctgtcatatatgttaagatgcggagagccgataagaacggttctggttgttcatccaatgacaacggtgtggagccggctgggatgcagtccttatggcaatccaaagaggaatcaggagcgtgatatacctaagcttaatgaactcggagatacctttaattcaatcgtaaaaaatctttgtaaaaagcattatgaatgtgacctcggtgatgaggttataataagcgaatacggaagctgcagcgatgataaatttgttattgggaaatgtgagtacaatactgtgataatgccgttttgcgaaaacttgctttcagaaacttatacgaaagttatggagtttatggaaaacggcggaactgtgcttggacttgctccgtttccgagattaattgagggagaagtatctgaaaaattatctttgcttataaatcatcataattttgtgaaactgttttcagaaaatgagcttattaattatttggataaaaatgttaaacgcgaagtttcaataatttatgagaatgataaagaggaagaaaatattttatatcagctgagatatgacggaaacggatatatcctctttttatctaataatgacagggaaagcgctcatgaggtcaatataaagttagatgttttagagaacttggaacagaataatttatatgtatattctttaaatcttttaacaggaactttaacgtcctgtgatttcaaatatgcaaaaggcagggtatgttttgatgaatatatgcaaggctgccaaagctcaatgttttatattaccaataaatatgttgaatgcggcagcagagatgttcagatatggaatgcagaagacaaccggattaaaactgaagaaattccagtcgaatatatcgcatatgaagccgatacaaaaaatattttagctcttgatatgtgcagatattgtatggatgaaaagtggtcggaaaacatagaggtttggaaagcacaaaaagaaatcagagagaatcttgaaatgcgccaaatttatcataatggacttgagcaaagataccgctgggtaaacacgcgtcataaaaacgatggaaaagatgtttggctggaatttgagtttaaatctttaaccggcgtggatgatgcagagttggttattgaaagaccggaatgctttaaaattgaactggacggaaaaataattgataataattcggtcggctgttttttggataaatcttttaaatgtattcagcttccgaaaataactgaaggcgttcataaactgagactgcaatgtaattacacaaacgatatggagctggagtgctgttatatattaggcgattttggggtaagcgcaaaccgtgaaatcattaaaaagccggaatctattagtttgggcgatataacggggcagggatattttcattattgcggaggtatagcgtataagtttaaatgctgtttgcccgaattgcccaataaagaaatatatttaatctcaaaggattttgacggagtatcttcgtcagctgtgataaacggcagggagattaaaattccgtggaaagaagccgggactgtggctgtcggaaagtttttacatgagggagaaaatgagatagttataaacgtgtacggaagtcctaggaatatgctgggaccattgcatataacaaataagcctttggttaccaaagacagttgtttctgccctttaggtgataactactcgccgaattataatgtggtaagcgtaggattaatgaaaccgctgagattgatttattttaaagattagtttctttgatgtgatcccaaaaagttagactatatagcgcagcagtttgatgactgctgcgttttttatgctgctttagcttagtgcctgtgcaattctttgacaggcttcctttatttgagctgtggataatcttccggtaccaagtaaaaatgtgcgttttggaatcagaggcgacggcagaatgctgtattctttaatagacatgatttttactccggccgcactgattttgctttttatttcagaggatgacatgtcaagattaaaggttacgattacgtttgtgctgtctgaatttggggatattgttatttttttgcctaacgattcgataagttcacgttttaatagttcgcgcttgtctcggtatacccgtcgcatggttttataatgcttagtatagtatcccttttcaataaattcagccaaagcgtattggtctgtttttgacgcaaaagaagaataaaacttgtgtttttttctccattttgaaagcagttcgtccggcagtatcatatatgcggttttcaaaccgggacacagcgctctggaaaatgtgtttaaaaaaatcacctttccgtttttatccatgctgtagagagtgtcagatgaatcccacgtgagttcggaatcatagctatcctctattatatatctgccgggagattcagacgcccatttaagcaaatccattttaagctcttcgctcattttataacaggtcggataatggcagtggggcatacaataaaatatactgcaatttgatttatataaatcgtctatatttaatcctgacatagatataggtatattaataacgtccgtgccgctgtcagtgaaggcgcagtacgagcgtgaaaatcccgggacctccattccaattttcccaaaatctatcagaacatcggcaagctgcgtcaacagatactccgagcctgcacctatgattatctgacgcggagaacatttaatatcgcggaaggaatataagtattttgcgacagcggcgcgcagagaatgttcgccgttcttttcgggatgattaaaaatgtcaattccgtcattatagacaatattgcggacaattttagcataactgctgcgtttgaaataagtaatatcaacagcgttaggcgtaaaaacataggtttcgcctgcgtcaatatcccatggaatatcctcaaactcaccggagttaaatgagacaaaatgccctttttttggtattgaaattatatatcctgtgtctgccagcatattatatgcttcattgacggtgttttgtgatacagagagctgcttggctaatatacgtcttgccggaagtttaaatttgtcaggcagaaaaccatcggaaatatctcttactatagcgtcataaagctggatatacaggggctttgacaatgatttgtccaaagaaatatttttcattcagaatcccccaataaaatatatttatacttaaatttattatatcattacaattgatttttgacaatactttggtactgtaaaaaatataaactctggtactgtaatttgttattgttttttgttatatttaaacaaagagaaaaaacaactttaaggagggttaattatgatgaaaaaacagtttaaaagactggcaagtcttgctgcggctgtgactgtttttgccgggatgtttaccggtattacagtaaacgcaaaatcggaaaccgtcagcacagcggagacaagcaatctgtttgattcagaaaacgttatgtggacagaccaaaaaataattgatggattttgggaaatggatccagatgtaagtaacaaaactaaaacagatattcaaaatccgtatggtaacagcggcgacatgtatgacgcacatgcgtattatgaatttttgtggacgcacggttatccaataggaaacggacgtatggcggctatggttatgggtgcgattgacaaagaggttatccagattaatgaggataccatttggaatggttcgccatatgttggcgaggacggcaaatcaaccgccggaagtgtaaaggatacatggaagtattacagaggcgccaaagcggacggcacgcctgccgccttcggtgaggagggcgaccaggttctcacgggcgatgaggagttccgtcagaaattccctgcatttgcacataagactattacaaatatggcgcttaatatagataacagcgatacacaggaagctgtttcaaacagacttgaccttgcaaatcttacaaatgacaacttcctcggaaatccaataaaacagagagcatattcagaatttgttgagcttttcttggactttaatcaggagagcggaaaagcgtcaaattatactaaacgtcttgatatgagcaatgcggttgcgactgttgagtatgattatgagggaactcactacacgagagagagttttgcgagttatccggatcaggcaattgtgacaaaagtaaagtcggaaggcggaaatttagacttttcggcacagcttcacacttggctgaaaggaggacagcaatttgagaaaatttccgataatgagattaagataattgccagaccggcaaacttatcagagagtaatggtttggggaatatgtcgaaaattgtgggcgaggcaagaatgtatattgacgcaggaagcggggcgaaactcagcgtttctgatgattgttcaaccataaacgtcagcggcggcaatgaggccgttatctacatagtaagcgcttctaactacgttgattacttaactcttgatgacagtaagcctgctcgtgactgtgataaatatatttcaaagataaaaaacaagtcatatgaggaaattaaagaggcgcatattgctgattacaaagaactttacgagcgttctgagcttactcttggaaacagtgacggcacggacgaaagcggtactacgacagagaaacgtgtgcgtaaggatgttaaaggcaaatccggttatgaaatcggggcaggtaataagcttgaagctaaaacccctgttgattcaacttataatgacggtgataataagctggttacaatgatgtttaactacggaaagtatcttatgatttccggctcacgtcccggagatactgagaacgatattcctataagccagccgcttaatctgaccggtaagtggaatggaacaaacaatccgtcatgggcaggaaaatatacaattaatattaatactgaaatgaattattggccgtcacagccgcttaacctttctgaatgcgtatttccgctaacagaaatgcttcagcagttggccgaaaacggaagcataacagcagattatcagtatggtataaagaatcacagaaatgacgataagtatgttcccggcgacccgtgggtaatgcacaataatacagacctttggcgcggcacacagtttgttgataattccgacgtgctttggcctatgggcggagcatggcttatggactgcgtttggaagtattatcagtataatcttgatgagcagtatcttgcggaattattcccgattatgcgcggccttgcagacttttatactcagttcctggttgttgacccagtgaccggttatcttataactgctgcttcatcatcacctgagcagggaagtgttcagccgggttcagcaatagatacacagcttataagaaacctatatgatatggttctgaaatccgcacagatacttggcaaggagaccgaggaagctgagcttattgcaaaaatcaaagagcaaatgcctgaaaacggttatttctcatatgagcagggtaaacttgcaccggatattatcgaaaccgataagagccatagcggctatgggcttatcagagaatgggtcagaggagacgttaaatttgacttctcaacggcagattcaagcaataagttatggacctatacatacccatttgtaacaggcaacgctgatgaagacacgacaaaggagagcagggctaaatataagtccggtatgtatagaaagcatactgctgcgaatggctcagagtgcggacataggcacacatctcatctttgggaactgttcccgggaacacatataaacgcttacagcaccgacaagcatgaacaggaaatttacaaagcgttccgtcagagcgttcttgcaagaggcgccggcagcggacagggctggggcgttgcgtggagagttgcgctgagcgcaagagcgcacgacccggcgacagctgatacgcgtattgaacagcttatcagaacaagagtttcgccaaatctgtttgaccagcatcctaacttccagattgacggaaactatggtcttacagcaggcataaccgaaatgcttgtacagaagcagggagattcggttgagttcctgccggcaatttccgataaatggcagagcggaagcttcagcggatttaaaataattggtaatattgaagccggagcagactggaaagaaggaagccttactaaggcaacattaaaggccgcaaacagcggaatattaaaagcacgcaacagctcgcttgataaaaatgcggttgttgttgacagcaagtataacaaggtgccgttcacaactgaagaggacggaactgttatagcatttgacgctgcggcaggagagacatattcaatttatcctgctgattatgtacagaccacaggcgagagcacatgggaaaagtatggtgcggaaatttcatcaaattccagctgggcaattaaaaacaagtccggcatcgctccgaaatattattcagataacttgtatattggaaatttggccaatgataattcttatatcggttttgctgttaaagactgtgatgtgcaaaatttaaaaacattaggtgttaagatagcgctttattcctcgatgattgacaattcagaggtttcagttagagttggctcttcaagcggtaccgaaattgcgcacaaggtgtttgacactgcgaccggaggaaataagagctttgcatggatagacataccgctcaatgaggatgttgaccgttctctgcttgaaggcaaaaaaacgttgtgcttcttatttaagactgatttaaaaaatgatggtacaaataataagtatattgccaatgttgagggtgtttcgggtaccgtattggtagagaccggagagaagcagtatataaacttaaaacataatggagacgattattatacaactcttcttctcaatggaacctatacggctactatttcaaacgatgcaccggacggcactttgattattgcaaaatatcgcggtgacgaacttatagacacagtaacacaagagataaattccgaaaacagaagcgctgaaatgaatatttcagatatagaaagcggaataacgatgaaagtaatgtattgggacagcacggacggtatgcagccgctgtcaatgatgcgaatattagaaacgtccggcacttcggtgccggacgttccaacacctgaaccaactgaccctcctgttcctacaaaggaccctgtgccatctatgaccccaattccgtcgcctacagcaacgcctgcattgccggaagtgacaactgagcctacatctactcctgctcaagagagcggaactgtatttactgttgacaaaagcggtgagacggatatttcaaagaatcaatacaagactattcgcgaggcgcttgcctcagcggcagaaaaaagcccgtcaaatgaaagcgaacgtataacaatagaggtagtaccgggcacgtaccgggaacaactagtagttaatacaccgtatattactataaagaaaaaacccggtactgacggagaagtgctttgcacctggtattacggaaccggaacaatgtataaaaactgcggaagcgacggtttttacaaagagggatctttgggagaaacggcgaatgtcgcaaagaattggggagcaacgcttaccataaacagcagtgcaaacgacgtgtggattgagggggttaccctagaaaactcatacaatcagtattatactaaagaagaacttgaagccggaatggaacctgacccggcaacaagcaacagctgttttgacagagacaagtggattaaggctatgattgccaaaggaatgtctaataatgagataaatagctggcttcagtctagaacgtatataggaaatgaatataacctcgacccggagaagaatgggagaaaagattcaccaagagagcgtgcctgcgcattgtataccgcttctgacagagttataatacgcaattgcagagtggtttcaaagcaggacacaattggaataaataaaaaccgtatatattttgaaaattgcttcttagaaggaacaaccgattatatttgcggaggtgcagtagccgttatgaacaactgcaccctcaatgtcggttcggccaagcctatggattcaaatacaggcgcaacagattctgcctgcataacagcggcagggcagtcgtcaggcaatggatatttattctataactgcgaggttaccggaacagattgggccacaccgagcgagttaggaagaccatggaatgcaaatgcggaggtcacatatataaatacaaaaattaataaatgtaagcgcagcggatatacgaataagtatttgatttcagataagggctggacagatatgggcgataataaagcggaagacgcccgctttggtgaatatggttctgtggacgctgaaaccggtaaggccattacaagcagtgtgtcaatacgtaaaaagtttatgctgaacgaatggtcaatgcttgagtataacccatataattatctcagaggcagcgataactgggatccatccggtatgaaccggtattattcggagtttgatgagattgcctcttcaattaacattgacacttcaggtgaaggcgatattattctacctgaagcggcagatggttatggttatcagtgggaatcagacagcacatacgcaagtgttgacaaagataagaacacaatttctattattcggccattatatggagacgagcctgtagaaaccaaaatttcagtatatatacgcaagaacggaacacagtacggcgcgagaaaggttattccgcttacaattcagccgcacagcagcgcggaaaatacattcagtgtaaatggaaccgtaagcttgtcttctgcttctgaggatgaagtgaaggttacagtaatacttatgcaaggcgaatgccctgttaaaactctggatgtaacagttcctgccggtcaggagagtgcagactacacgataaataatcttcccgagggcagttatacagctcaaatatcaaccgatacgcgtgaatatactttgatgacagattcaagcgttgagctttcaggtagatctggcgagacaaaggaattaaatatctcactgagcgagtcaatggctacgccttaccctgcaaaattcactgttgacgatttaatcaaaacagaagatatgatgcgctggagcaacggcgtagatgtcacaacttcgtctgacagcacaaagcctcttaaaacggcttcaagcgcaagcgcaaccaaccttttggtaaaaactcctgaaaactatacagcggagtatgaaaaagcgtttggccctgcagatagtttgcgtacgaatttcaccaagaagctgggctatataaacttctgcgccgaaagtgaggaaagcaccccttcaattgatacatatatttcggtttacttctcagtatcagaggagcaggctgcaaagggaccgtacaaggtttatgtgcttaccaacagaaagcgtaatgattcacgcatatctattgagacgccgaaagttggatttgttgaaaatctttcggctgattttgtaaatatgtcaacagataccgacggcacaggagtacatgtaattgagcttcctgagtttaaagcgggcacatatgaattcaagtggtatccggtgaaaacggcagacggaggcacaaaagtcgcttcagatttctttgctttgagattccttccggtttccgagacagacggaaagtagaaaataataaattgaaaaaacaataatttcttcccaattaatattaagaccttaatctatcaaaaagatgattcttttttaagattaaggtctttcttatgtgtttattttaaattttataaaatagtattattattggaatacctataatgaatataaagtttaataagaaagaaaagcagatatacattaaccgttatttatcaggtgtattggtaaatctatggcatagtgcgcagtacgctgtattctttgattaacaaatataaaaataaaagtggacaaaccctttataataaagaatttgaccacttttataaaaatgcttggtggatcttcagggactcgaaccccggacctaccggttatgagccggttgctctaaccaactgagctaaagatcctcatttgttctgactaatttatagtctcgaacaagaacttttatattataatccatattattctatttgtcaatactatttttataaaaaatttttaaacttataagaaaaaattctctaaaaaattgttaaaattgcaaaaagtacttgcaaaatatagagttttagtatagaatgtaaaaaaactgatattattttttaggaggtacacaccaatgataactgctggtgattttagaaatggaatgacatttgaatatgacggaagcgtatgtcaggttgttgaattccaacatgttaaacctggaaaaggcgctgcttttgtcagaactaaatttaaaaatgtaataactggcgcggttgttgaaaaatcttttaacccgactgagaaatttgaaaaggctatggttgaaagaaaagatatggaatatctttatcaagatggagatttatattactttatggatcctgaaacatatgaacaggctcctctcagcgctgaccagttaggcgacgctcttaaatttgttaaagagaatatgcaggttaagttttgttctttcaaagggaaagttttttcagttgagcctccgacatttgttgagcttgctgttatgcatactgaacccggagttaaaggcaataccgctacaaacgtaacaaagccggctactcttgaaacaggtgctactgtgactgtcccgatgtttattaatgacggggatatgataagagtggatacgcgtaccggagagtatatggaaagagtataattataatataataggaggcattattatgtctgatttgacaaaagaagcggcatatatcaaaggtttgttcgatggtatgaagctggattcacagaaggatgaaacgaaaattttatcatctataattagttttttagagaaaactgctgatgagatagatatgcttgaccaagagcagggatttcttgcagaccaaattgacgatgttgaagaagttattgatgttttagcagaggaaatcagcgatgagtatgacgatgacgctgatgaatatcaaattaagtgtgacaattgtggaaacaatgttcattttaccggcgacgacattgatgatttggttgaaggtaatttcgactgtccatattgcggtgaaactgtacagttggacttgagcggtatggaagacggatgtgactgcggatgcagtcatgaccacagcgaagaatagtatttttgaataatatttaaaacagactgaaatttcagtctgtttttttgttatgtttaatttgatatgaaatttatttctataattttgttttctctcggttatagttttagcttattggtaaagtggcacgcgctgtcattcgaaataacctaaaatgaaataggataccacagaaaatattatagaaagaaggttagttaatggctttatggtatgattctaagaataatgagtatgcttcagatggcaaaaaaggctggataaaatcgtattgtgataaagctttgtctgaatttaataatttaatgtcagcacattttaaggggcagtctaaccgccatatggcatgtgatttggattttgacagcaatatgacagttgaagacaagctgaaaataattgaagatgaaagcaatgcggcagataacagattaaagactgagcttgagagcaaaattaataaaaaagctgacagtataacaaacggcggttttgtggcaggcggaggagtagtaagcgaagaagaaggagcggttgttattggaaacaaggccgagtcgtccaatggtatatctataggcggcggagccttaagcaaaggcggtatagctattggaagagatgctaaagtgtcttcaggtaatggcgtacagcttggcgcaggagaaaatataaaagaaaaaacattaaaagtatatgactatcagataacagatattgattctgaaaccggacaatcatatataaaagatattggaagactggcagatattaatttaaatatagttaatgttgctgacgctatcaatactttaattgatacagatgaagatactgtaaatttaataaccaatgaagtcagcgcccgaattgaggcggataaaaatattaaaaaggaaataccggtcaaaacaatagagaacataacgtcagagactacagataacagcagctatgttacaccgcttatggttaagaatgccgtaaataatttgattgaaagctctgaggagataaaaaacattaccgacggcttaaatcaaaaggcagataaggttacaaacgggggctttatagccggcggagcacaagcaggcggagctcaaaatatatcaataggcgacggtatagcctctaccggcgaacgcggagtagtaattggagcgggagcagagggagctggtcgctgcgttgcagtcggaagtgcgtctacggcggcagcggctaatgctgttgcgataggatacggtgcggaatgtttggcagataatgccgtacaaatcggggacggaagtaattctgataaagaaacattgaaatttcgggattataaaatagttgaatgcgagagtaactctaatgcgcattatttaaaagatataggaaggataataaatcttgagacaaaagataaaaacagcattgtgggagcggtcaatgagatttataagaatcttgaacttagtctgatagttcctaacgccatttcacagagcgttataatgacaaaagattctgatggaaagtacaaattttcttttactttcaataatgcgtatattacgtcaaacagattatttgataatgattttaaaagtcagattaataacacgtttgaaataaatatgttagatgcgccagagtttaataaaccatattatttatatcttgaatgggatttgattctggatgaatttacaatgtttagtacagccgataattttggaactaaccttaatactgaatgtttgcagttttatataggtacgtttactatagtggatgataaaacagttgattattacgatgagcaggagaaaatttctgtaaatcttataccgatgataggaaactatctgtcaagactggattataaatgttatgaactgcaaagagatacggccaaaaagaatacagctgtattattacagaaacttgataagacggaggaatttaacatttggcaaaacggtaattggatagtggaatataatataccgcccataaaaattacagacgagacatacggaagctttacactgccgtctcaaatgttggaagcggcgggagttaaagaggaagcaggcgaagagaaaaaatattgttatgcttcttacgtgcttgacactgataacttatcaggtgaaataagcggttctgatatgacggtgacatgcggcttaaaagaggcaaagggaaaaccaaacagctatatagagatagaagatgaaacgaagttagcaactataaatatatatctcggaactattatattaaatgcagaagattacatgacgcctgatggaacctcgagtactatatattcaggcagtgaaacaacaaatacggaaatgactattgatttattcagaatatttacagagtcaaccgatgtatcaggagagttagtagaaattacagcagatgaggtaagtgcattattttaattataaaaaattatattttgaaaaatagcagtgaaaataagccatgttaatataattattagttcggctcatgtttttagagtgagagtttcataaaattcgcaggcaaagcctgcatattaattaaggagaaaatattatggcaacaaaatttttaggaacggcggcattaacaaaattagtagaaaagattaagggcgtatcaacagcgataccgacaaagttaagtcagcttacaaacgacagcggttatcagacaggttcacaggtatctactacagttacgaatgcgacaaaaactttagctttaaagactgaggtaacagctgtagacaataaaatcggagatttagctgatttggatacagacaatacgagtatagttaatggaatcaatgacgcatggacaaattgtgaggaaataagggacaatataggaacaagagcaaatttaacaacgactgctaaaacagaccttgtatcagctataaatgaggtagacagcaatgtagataatttacaggaaactatgatgacaggatattatacaaaggctacagtggatacaaaaatagcagagtctaaagcaggactagcaacagaaacatatgtaaacaacaaagtgtcaagcgtttacaagtataagggcagtaaggatacatatgcgtccttgccgacaacaggaaacgcagttggagatgtatggaacgttgttgataagaacggtcaaaattttgcatggacaggctcagcgtgggacgctcttggcgagactatagacttaagcggatatatgaagaatgacgcactgcaggaaattacagcgacagaggttgaagctttatttaagtaaatttggagggatatagatggcgacaaagattttaggaatgacagcattgacaaagttagttgataagacgaaaaaatatgtaaacgataaaaagatgctaaatgtgatgaatgattcaagtgcaagtggaaactactctgttgttttaggaggacaggggacggtgcccggagtttgttcggtttcattgggcggttattctaatgctgtgaatggagaaagggcagtagcaataggcggctggtctttgctctgcaacggatataacactgtatgcggtaaaaataatttagaaccaactgccggatattattctcataataacggcgacggatttatagttggaaacgggacgttaagttcccgttctaatgctttccgtgcggcttacagcggtgatgtgtatgctatgaagtcaataaacggaaccggagccgactatgcggagctcagagaatggtcagacggaaatcctgataatgaggacaggtgcggactatttgtatgctttgacggcgagaagatacggcttgcaaattcagaagacccaaaagacttactcggagttatatcaggaaatccgtgcatagttggaaacaactatgatgaccagtggagtgggaaatataagaaggatgtatttggccggttgcttaccgaacatatgatatgggaagaggaaacagataatgaaggcaatattataacacctgcaggtgagggagatgtatatattttatctgaagactacgatccatcgcagaagtatatacctagaaaggaccgcccggaatggggatatatgggaacgcacggagaattggttgttatagatgacggcacatgtgaagcacaaggccgctgcaaaccgaatgacgaggcaaaagcaacggcggcagaagatggattttatgtgcttgaaaggatagatgataagcatattaaaatatttatgagataaaacggttatattctgccaaaattagttcggttaaaattttaaaaaggtcagcgtttgctgaccttttttatatgataatagcaaaataaaaatataaagtcaaagaagacttttaacggtgttacaaatatttcagcaattacactgtgatgtaatgaaaattatctgagtgggacgattactagctgtacaagacgcttagagcagttaactgaactaatttatacgccattgtcaacaatctcaagcggtttattagaccaaatattactaaattgttccatagaataatttgacataggataaacaatgttgtaatattgtattaatacagaaagggatgagcgttatgataaagaaaatattagaaaaaaccatggttttaattgcggtagttatatttataggaacggtaaatgtaatagcagctgataacaaccacattactgtttatgtaaatgattcaatattggacgctgatgttaatgcgcaaataattaacagcagaacaatggttccaatgcgcgctatttttgaagctctaggagctgaggtaaactggaatgaggaaaatcaaactgcagtcggcacaaaagatggcgttacaataagtctgacaataggaagcagaacaatgtatgtcggtgacagagttaagaaattagatagtccgcctttgatagtttctgatagaacattaatgccggtcagagctgtttcagaagcttttggatttgaagtgaactgggatgaaccaactaaatctgcttatataggaagccataacaggcttgacagtttaaagcagaaggtttcagaaatgggtattgatgataagatatatcaaatgatgattgtaactcctgaatcaataaccggggttgaaaaagctactgaagccggtgaggcaacaaaggcggcaatagaaaaatatcccgttggaggtttggtatatttttctaaaaatattgtcagcgagaatcaaataaaaaatatgattaataattctcagtcctattctaaaacccccttatttatatctgttgatgaggagggtggaagagtagcaaggctcgggaatgccggtattggttttcctaaaattccacctatgaaagagattggcgattctaaggatgttggaaaagcttcagaggcaggtgaaacgcttggaacagcgctgaaagaatatggttttaatcttaattttgctccggacgcggatgttgaaatcaattctaattcctcaataggcgaccgttcgtttggcagtgaccctcagcttgttggacaaatggcgtcagccgaaatcagagccatgcagtcaaaaggggttagttcctgtatgaaacatttccccgggattggtgcggctgaaggagatactcataacggttttgttgcaactgacaggtctttagaagaaatgaatttatgtgagtttgtaccgttttcatacggagccgcagcagactgtgattttgttatggtaggtcatatatcagcccgaaagattactgaaagtgatgttccgtcatctatgtcttcaagagtgatagctatgcttagaaacgatattggtttcagcggcgttgtaataactgacgccttagacatgggagcaataattaagacttatacgacgtcggaagcgtgtatagcagcagtaaatgcaggagccgatattttgcttatgccctctgatatagatgaagctcattttgccttagcgaatgctgctaaggaaggtattttaacagaagacaggattaattccagtgttatgagaatcttagataaaaaaatgtctagggggttaattaattattaaatatgtttttaataagagtttattgctatagaattgagtattaataaatatcaaagcggtgtttgtaacatggttgtaacacgtttgtaatattgttgaaataagacaagctaattgactaaaataaaaaataatttatacatgttgcacaaaaaatgtatgataatttagtgtttattccctcttgtaaaagtatttagataaggttataatttaactataagaaagttaatttataaaaattctgaaagggggagcaaaaatgaaattcagaaaggtgatagtcggagcggttactcttgcggttatgtttgtatcatgcagcggattaagttgttttgctttatcagatgccggttcagacaaaccggatgatattgaccaatctacgtttgagacagttgttaaaatagatgaaaatcttaatatgattatggataaaaatgagaattctgaagttgtttgccaatctgatattgacgaactcgctgcccttattgatagatttaatgatagcattattaagcaaaactccggtttgtcacaaattcattttgatatcatttggaaagttgattttgtgactagccagatacctgaaaaagataaacttgatatgagaaatattcaaaagagtattgaaagttttaataatatagtcagacttttgaaaccacgtacggaaagtgctgaagctgtcggataatctgtatctggttatatttatcaaagtataaaattgaaaataaaactccaaaccaaataatcaaaacaaaattttataaaaccctcattatttctttttataaaagaattttgagggtttttattcgttagtcagatgaaaattaacaaaataacccaacaaattctaaaaaagtcttgtgcagttgttttgttttgtgatataattactaaaatagaaagagttacagttctatattgatatgaactaagaaggtgacttaaaggtgacaagtaataaaaaacgaaagattcttgtagttgatgacgttgagcagaaccgtatgatattatctgaaattttaaaagatgactatactgttattgaggctgatgacggtgatgtttgccttaaaaaattgcgtgaagataaagatataatcttagtgttgcttgatattgtaatgccgaaaatggacggatttcaggttttaagagagatgtctaaagataaagaactacagcacaaatccgtaattattacaacggcagacagggccatagatgctgaaataagagccttgcgtgatggagctgtggattttcttgaaaagccttataattctgatatagtaaaatgcagagttgataatatcgtgactcgtatagttttggaaagcgaaattcttgaagaaaaacttgatttagccaatgagcgtttggctgcaatggtagatcttatacctgacggcatagctatatttgattactatgagtcgggcagggtggatttaggatattataatgaatattttgcgaatatatttaatattacgcgcagtatagctgatacggagaaaatatcttttgaaagtttaaatcaattatttgaattggacttaatttatccgggcgacagaagtcatcttgaagaaaaggttaaaaaatgtattgatgatagcggaactcttacatgtcagtttagaattaaaaggaatggagcgtttagctgggttcgtatgtctatgattacatttttgggcagcaatggagtttgccgctgtcatgttttattctctgatatttcttctgaaaaggatagagaagaacagataaccgacgcgcttaataagcttagatatgtaacgagacacgataaattaactcagatttataatagagaaactttctgcgcttccacagataagctgctcagtgtcaatccttctgtaaaatactcaattattatgtgggatataaaaaactttaaagtaattaatgaattgtttggcagcgataagggcgataaaattcttatattaatagctgatactttaaaaagtttggtaggaaacaatggaatttacggaagaatggagtctgataaatttgttgtttgtattcccgcaagcctatgtgatataaattcaataattaataaaatggatatgacgctcaatagcgccaatattgttgattataatttgaaaatttttgctgggatatataatatcatcaatgatgagaaaataccaatagaccagatgtgcgaccgtgccaatatggcgcttaaaagcgctaagcgtgattacgtgaacagatattcttattatgattctgaaatgcgtaaaatggttatggaagaagaactgatattgaacgatatggatactgctcttcaaaatcaacagtttaaggtatgctatcagccgattttcagcgtcaccagcggaaagccaatagctgcggaagctttggttaggtggatgcatcctgacaggggcgttatatcaccgcagaagtttataacagtttttgaaaataataagttcattacaaaattggactggtgcgttcttgaagaggtttgcaaatttcaaaaaaagcgtctcgacgccggaaaagttatgctgcctatttcggttaacttttccaggcttgattgttacaaacctatgatatgtgaaaatgttttggggttaattgaacaatatggactaagtcctgatatgataaagatagagattacagaaaccgcctatacaatggataaggaacagataatagatgttaccaataagtttaggagttatgggtttcaagtccttatggacgattttggaagtgggtattcatcgcttaacactttaaaagatgttaacatagatattttgaaaattgataaaagatttattgatgatattgaagattcagataaggccggtgctattgtttcgagtgttgttcgaatggcaagattgattggcatggatattattgcagagggtgtggagacgcagtatcagaaagactttcttagaggtatcggatgtgataccatacagggatatttttattctaagcctttgtttgagaatgaatttaatgaggttatagataaatatagtaagctgccaattgataaatgtgtatctgatattagagccaatgatttgaatgttgagagtatttggagcggaaataaagaagtggacgctttgtttggcggactcatcggcgctatgggaatgtatgaacttaatccaaatggagttcttgaaataatacgggttaatgacggatattatgatttgtttggctcgtcgccaggcagtgtgtattctgatttgggtctaagtttcagcagacttgaggatgaaagcaaagacttgttgctgaacgcttgcagcagagcaaaatatgaaaaccaaataataaatgttgagcttaaaaagtatcatgaagacggtcatttaatgtggctgtcatgcagggtaaaacatattggaaaaagcgacaacagagacttgttttatatattgataaatgatataacagaacaaaagatgcgtgatacttcacggcaaatttctgtttatgcggatatgtttaaatcattttttaatgaaatttttgaaataaatacaattaataaaaccgtaacggttatgtatactgatggcagaattggttttgagacaggtgtgaagtttgatattgatacatttatgaatttttgcaggtctaatttggctgatcctaaagattatagttcacttgataaaaatataaagcagtcttttgaaaatgcacctgtttttgtcgatacatataaggttttagatattgatggtaatgctagatggtatgaatgcagggtgctgaaggttaacggttcagatttaggcatatacctttgttgttcagcagatattactgaagagaaaaatattgctttatcaaaagaaaatatgagaatagccgagcatgtaaatgaggaaaagaagcgtttgtttgcggttttgagcaggcttaatatatgtgttttcgagttagatttgaaaaatgacgtttttattatggatgaacagacggaatatgaatttaataactttttcggtgatatttgtagtataagcggatttgttaataagacttttggagaagacaaaaatgcttttgatagctatttgtcaaaagttaaaaacggcatatttgattcaggaataactgtgagaattttaatgagctcaggtgaatatggctggtttaaattagatactgtgcgtcaaaccgaaaaaggcgaggttaaaaagattatcggcacgatacaaaaggtagatgaaagtctgacagacgatataggaatcataagagaaaaagaacagcttgtaagtatgctgaattctatgcagtttggagttggaatttttgagtatgattctgatagtttggtaccgaaattttataataaccgtctgagagaattgcttgaaatttttgacggcagtgtttatacgtcgtcgccttatgttaatgatttagtggtttatatttctaatgtatgcagcaaatatgttaatgataaaaatggtgttaatattaatttgtcagaggaacatgaatataaatgtagagacggttcaaaagcttatgcaaatcttagtataactataattagtttcagcaaaaataaaatggtagtttattgtgttatagatgatataacaaatagaattgaggcggaaaacaaatttaaagagcaaggatatgtaaactcaattttggttgagacatctgagtatataatattagattataatgctgtaactaaaagtcttactatatccatgccggtgcgtgatggaaaaagaaaagaatacgaatacaaagatattaactctctcagttcggtagggtgggtgtatcctgaatatttggaatcaattgatgaattgctgtttagagaaaattattctgaagacaaaaaggatgacagcatagaacttttagcgaatataggaggatgcggatacagatggcaccaagctgtttttcattatgttcctgacagtgagaataaaatagttagagttatcggcagaatttctgatatacaaattaaaaaagagagagaacttgccttgagcaacgctttaaacgaaagagaaaaattgttggaaaaatctgagatagacagtgttacgggacttctcaacagattaactacagaggagtgtattgaaaataaattgtccaaaataaaatctgagtgtgcgtttgtggtttatgatatagataactacgaagatataaacgcagacctgggacatataaaagcagaagattatttgaaaaaagttgcttcagtgtttgaggacagttttagacatggagatattatcggcagaatggattcggatgtgtttgtagcatttttaactgatgtaaaagcaaaggatggagtctataataaggtcggcaaaacaatggcaaaaatttgcttagtttctgaggagtttggatttggcaaaatgggcacagtaagcgcaggaatagcattttctccggataatggcgtggactttatgactctttataaaaaagctaatatggctttgtgcaaggctaaaaaatcaggaggcaattcttatacaatttatagtgaagtttaaatgagctgaaatttttagtgattttgattaaataattgattaagagttgtcgcgtggggatgagtatatgaaaaaattattgtacataattttgatattatttttattcactaatgtcataaatatttttattcctgtttttgctgaagaaagttcctctgcggaggtgtctttttgtgacagggatggatgggtgagcatggttgacggatactccggcgggcagtttaattttagcaggcttcaacagtatccccagccgtttgttaatgaaaacggcagaacgatgtttcctattctttattttgatgagatttttagggatggtttaagttatgatattaatgataatactataacgataacaagaaatattcttgatgttataacgactgtcagtgttactatagatagtaatgttttaattaaaaacggtgaagaaatcgttatggataccgtgccaatcagaataggagaaacgatttatattccgctgtggtgggttgctgattatcttggttatggcgttttatggagggattatcaaagtaaatggtggcctggaggaatggttgaatttggacaattgacatccatctttgtttatgtctggaatgaggataaggattcttcaccaaacggattaaggtattcatatacaattggcgaacggtctgatgatatgtctgaaatcaaggcaaatgctgcgtcagattttgaagatgtatttgctgttattaaaagacttcctcaaggagcaacagttttaactacagcgatttatgggcttgatggatataaagtcccatatgatatatataatggaataacaaatgctgtgtttaatggaggctataagggcggatatagtacatattgtctcgatgagattccaccgattattaatagtttgggtgattttacaaatgaatggtattcagaggagctttccgctttaggagaaccggcgctgtatgattcagtcggtcaaatatatcgtttttcatatattccttcattttggaatccgtttgttgttcggatagaaataaacgatgatggaacagcaaatgtgtgctataaatccggcaacggcgttgcgggtcctcacagcggcgggattttaaaatccgagagtgccgaattaagcagagaagaaactaaagagtttcttgatttattaaatgataaggattattggaatatgccaaaagaagttgagagattaggctgtgacgggtatgatgtagtaattgaaggagtaaagaacggtgtatatcatatagtaaacaggtggtgcccaatggaaaacgattcagctttttacattgaaaaatattttgaaaatttggtaaaagaaaaatttcctgaataaagtaaaaataagtatattttagttttatgatatcaaataaaaaatcagacaataaagagataaagctgtttggtaatttacttatataccatgattttatgagaaactattatatgtttttgataaatatattaattactgcatcgaataatcacgttcattataatgaatttgataaatagatagaatgttaagtatttagtttttttttatactttaataatatacagctataagtaaatgagcggtaaaattattaaattaagggtttaagtatgaaataagcatctgatggctaaatctttcattaatttagataatatatttattgaagacaaaccagataagaaataagagtaatttaaatcatattgattgaaatgaataaacataatttacagaatagaaataaaacctcttacagtatgaactgctaagttttttataatcttagtatccatattataagaggttttttgtgactttatatttcaaagctatacatcaaaactgatttgttcaattccccggtcttgctcacggacagttgctcctacagccggaactgtcttggttctgaatctttctatatttttcagtcctgaatctgaagcgggaacggcctttgacactatactgccctttctggaactcattatgttaacgccttgagttgttcgcgtagtttttaagggtatcctttctgtatttacggtaatcgccctgtctttgtctgaaaataaaacaatgtccatttcggtttcggccggaagataaaacatctcaacaagaggcgattttgaagaaaatccgttggcaagtttttttcggttagtttttgtttgatatgacttcagcggaactctggccgcctttccgttttcaaagaagaatactaaatctcctgaaaaatcatcggttgcggacatacccacaatctcttccttttcagttagtccgacaagattgggtataaattctcccagcaaacttgctttgctgtcaggtacgtcgtaggctttgattttataaacgtctcctgatcttgcaaagaatataatttcactgctgttctgagcttcaatctcctgaatcatagtatcatcgtccttgagccgctgttcaccgctggtgcggagtgatacgagtgagattttctttaaatagccgtgctgtgttctgaaaagtttgacgctgtaattatcaattatttcttcttcgactatgtctttaatctcatcagcagttataatttcagtttttctgtcgcttccatattttttcgctatttgtttcagctgtttttcaatcagtttgtttatttttgttttgctttcaagggtggatttcagttcctcaagttctttttttaaggtttctatctcagctatcctttttagaatataatctttattcaaattcctgagtttgatttcagccacatattctgcctgaacatctgttattttaaaacctttcataaggttcgggattaccatgctgtcgtcttctgtctcacggacaatttttattgccttgtctatatccaaaagtataagtgagagaccttcaagcagatgcagtttttcacttttcttttgaatatcaaacgctatggctcttttgatacagcttcttctgaatctaagccactcgcaaatcatatcgttaactcccaaaacaataggagaaccttccacaagaatgttaaagttacagccaaaactatcctgtaaaggcgtcattttaaagagtttcagcattagtttgtcagggtctactccacgttttaagtcgatagttattttcagacctttgaggtcggtttcgtcacggatatcagagatttctttgactttccctgacttaactaaatcaactattttgtctatgattacttcaactgtggttgtataaggtatttcttttatatcaatgcaattttggctcttgtcatactcatattttgctctgactttgaaagaacctcgaccggtgcggtaaatttccctgagttctgagcggttataaatcagttctccgcctgtcgggaagtcgggagccagcagtgtgtcaagtatatccgcgtccgggtcatgcataagcataatagtagcttcacaaagctcacgcagattaaaactgcaaatatttgaagccatacccactgcaattccttgatttggatttgccaaaatgcttggaaatgtggccggaagcagagtcggttctttcatagtgccatcgtagttatcaacaaagtcaacggtatttttgtctaaatcaccaaataattcactgcatacaggatttagttttacctcggtatatctcgaagcggcgtaggccatatctctcgagtaaacccgtccaaagtttcctttggatttgacaagcggcagcagtaaagcgccgttgccgtcagtaagtcgaaccatggtttcataaatagccgaatcaccgtgcggattcagcttcatggtttgtccgactacgtttgcggacttggtaagattgccgtttaaaagccccattttatacatagtataaaggagttttctgtgcgacggtttaagaccgtcaatttccggaatagcacgtgaaattattacgctcatcgcataaggcatatagttttcttccagcgtatctattatttgctgttcttggattatgggttttttcatttaatatattcactccagtattatgatacatctgccatttcgatgtattggtgtccgttttcggcaatgtgttcttttctgccggcaagattgtctccgagaagaaggtcaaatgtttcctgagtttttataacatcgcatggggtgactttgattaaccggcgggtttcaggattcatggtggtcagccacatcatatccggttggttttcaccaagtcctttgcttctttgaatagaatatttttgtccttcaagttttgaaagaatctctgatttttcctgctcgttgtaagcaaaatatgttttcttttttgaggttatctcatacaaaggggattcagctatataaacgaaacctttttcaataagcgtaggtactaaccggtaaatcatggtcaaaaccaatgttcttatctgatagccgtcaacgtcggcgtcggtacagattattactttgttccatctaagattgtttaaatcaaaagaacttaaatccttattatgttttgattttatctccactccgcagcccaataccctgagcaggtcaacaataacatcgctgttaaatattctgtcatactccgctttaagacagttaagtatttttcctcggagaggaattattgcctgaaattcgctgtctctgccaagcttacaggcgccgagagccgagtctccctcaactatatagacttcacgtttttcaggatctttgcttctgcagtcaacaaattttttaacgcggttagctacgtcaagattgccgcccagcttcttttttacgtttattcttgttttttctgcggtttcacggcttcgtttattaacaagaacttgattgcatattttgtcagcgtccatcttattctctataaaataaatagccagctgttccctcaaaaattctgtcattgcgtcctgaataaacttgttgtttatagcttttttagtttggttttcgtaactagtcatagtggagtaagagttagataccaataccaaactgtcctgaacatcgctgtattgaattttgccctcgcttttattgtatttgttgttggctttgagatactggtcaatagcatatacaaaagcgtttctaacagccttgtccggcgagccgccgtattcaagaaagctggaattatgatagtattcggttgtgctgaactcgttgtcaaaacagaatgcaaagctcatttttaacttatactcagggaggtcctccctgtctcttccgctgcgttcggtttctatataatgaacgctggtaaactctttttcttcagtcagctcttttatataatccactataccgttttcgtatagaaactcaaactcttcaaattcttctttggaaatctcgttttttaaaacaaatttaacgcctgaatttacaaccgcctgacgtctcagcgtttctttataaaagtccaacggtatgtcaatatcagtaaatacctttatgtccggcttccagcggattgtggttcctgtgtggcggtgtctgaattttgtctttttcattccgtcgatattttctccggcttcaaaatgaagctcatatttatatccgtctctgagaacttccacatccatatattcggagctgtattgggtagcgcaggcgcccagcccgttaagacccaaactatactcatagtcgccgccggtattgtttttgtattttccgccggcataaagctcacagaaaacaagttcccagttatattttttctcatgttcattgtagtcgaccgggattccgcggccgaaatcctcaacttcaattgagttatctaaaaatctggtaattattattgtgtcaccaaagccttcacgggcttcgtctatagagttagacaaaatctcaaacattgaatgttcacagccgtcaattccgtctgaaccgaatattacagccgggcgttttctaactctggcagcaccttttagggccctgatgctctcgttgtcatattttttagcgcacatattatattcctccaaacaattcgagttattataccataaaacgaaattattgtaaagcggtcaaatatccaaaaatccgacacaaaaatagaacgccggcagagcgttctatttaataaaattcagtttattttattcagtcatagttctgagagcggctgcttcaggggcatttgttacagatacgggatagcttgtatattaaacattccggcaactataattttaagagttagtttgctgagccagacccggttccgcccgccgggcccgggcggcgcagatatttactttagcagttgattccatataaagttgatgttattggttattcagtttataaacagtaagttaaaaaaatggtttacgcgctcggagctggcgagcgcactgggctaggccgcataccaatgaaagtatcaactgatatggaaaagaagacaatttaaaatataaataacttgtatattagacattccgtaaactataattctaacagtcagtttgctgagccaggcccggttccgcccgccgggcccgggcggcgcaaatagtaactttaattgctgattccatataaagttgatgttttggttattctgtttataaacagtaagttaaaaaaatggtttgcgcgctcgggtccggcgagcgcaactgggctaggctgcataccaatgaaagtatcaaattaaaaggggaaaagacaatttaaaatataaataactttatattagacatttcggtaactataattttaacagtcagtttgctgagccaggtccggttccgcccgccgagcccgggcggcgcagatatttactttaaaatatatagacttcctcaaaatattgacagctttaggtatgttttagaatttagaaataatattataactcgccgcgtctttttattcagacgcggcgtttttgtgtttaaaacaaaaatatttatggtatagttaccgaatttatgcagaataatattattaacaaatatgaagcgtgattaatttaggaaggaatgagatacatggaatatttaagcgaatggacagtatctcctgagaggtggctcaggcttggatatattttgggcgcgtcggaaaacggcggaagaataagcataagcagcgacgaggaggatttgtctaaacttgccgcagacacaatcaaaataggcgttaaatacgcaggctcaaaagtgtataattttggggaacaaaatttgcctataatgcgtcatgccgtcaggttttataaaaccggcttaggcatttttgtcaatacaattaagggcgataacggcaatgtgttaaacgtggatttgttagataaccgcggtattaaagtgccgctcaaaaatttagttaagcgtgaagagttagccaaagctgaaagtcttgtcacttctgatattactatgggaacggttgggcaagaggtaaccttatttgagtttaaaacgcattatatgagacatattatcaacagtatcaaaagtgatacgtttaatatgaatatatgtctttcaacaaaatcaaagactatttcagaaattttgaaggtcgttcttgatgacctatactcaaaaatagagcctgaggcgctggaaaagtatgagttcagcggtataataagcgaaaacggagagcagattaatttatataaatcagacggcacagaactttccagagaacaaattttatcagtaatgatttatgttttgctcagagacagttctataagaacctttgtggttccggacactatatcagaatatactgaaacagcgattttgaggcttggcggaaatgtgatcagggtatcgggcggcgattcggagataatggagaaaataatttccagcggaagcagcgaacaaatgctgatgcagtttgacggaatatatgcggcagtaaaaattttggattttctgaatagatacgatattagttttgacagtctgacaatgcatttgccgcagatttttaaagccgaggcagaggttgcctgcggcgacgaaaaacaaatggaaaatataataaaatctttaaaaagacagtttaagaataatgcaactatattgggcgatagtgacacagacgatgaaaaaggaagtgataataacaaaaaaagtgaaggaattaagattgaaagcaatggaactgtaactattgttttcccgggaagcggaaataatatattaaaaattatttctgagtccgaatctatggaaacggcggaagaaatatcaacgctgtttaaaaataaaataaaaacacttgcaaagagctgaacggtatgttataatgaacacgatttgtgagacaggcgctcgcttgtttcaccgtacggaaccttgcccggttattgccgggcgctttattatatgacagatttttgcatatcctaagattccgcgtctgtgtttcgctgtcaacggtcgatatttaatggctgcgaataagtttaaggcgtttgtatcttggattacgccgaatcgggtcaattttaaaaagtcaaaatcttttcattaagcctgcaggcggaacggatatggttgcattgcagcggaaaagttttgattcggaatggttttgattgcagatttgaatacaaatgactgaaatagtagtgtttcagggacttggtttatgtcttgagtattttatactgagaattttttagttttgataaaatatatagggtatattttttgtattgtattttagtttgtaacagctgttttggctttagattttctgtagggcgtaatgtgtgttaaaacctttgtctgtgcaggaatttgttgttatattatccggaacgaatcgaataaaagttattacaggaggaaaattttgaagaataataatgatacacgacagaacaacaataagcaagctcagaacgtcgctaacaagatggcgcataaggtcgtggataagatagctaaaatcagcggcgttaatgagaaaacaaacaacaataataatcgaaataaaaataataatagtaacggtaaaaacggaaacagaaacagcaatggaggaaacagaaagaataatacgccgaaacatacagataaaccaatccgtattatacctctcggcggactgaatgaaatcggcaaaaacttaactgtgtttgaatatgaggacgatgctttgatactggactgcggtatggcgtttcctgacgatgatatgctgggtgttgatattgttattcctgatataacgtatcttcataaaatcgcggataggattcgcggcatagttttgacgcatggtcatgaggaccatatcggagctttgccttatgttttaaaagaattttcagttccggtttacggaactagacttactctcggtattttaaaaaataagctcaaagaacatggtatactgaatcaggtaaagcttaacacgattaatgcaggagacaaagtgaagcttggagcatttacggctgaatttattcatacaaaccactcaatagccgacgcggtagcaatcgcgcttcatactcctacaggtataatactccacaccggcgattttaaaatagattcaactcctatagacagcgatatgattgacttggctcgtttcggcgagctgggaaaggaaggtgtgttagcattattgtctgacagtacaaatgctgacaggcccggagtgacatttagtgaaaagtcaatcggaaagacatttgacaatctgtttgaaaaaggcgagcagaacaagcagaggataatagtagctacgtttgcatccaatgtacatagggtgcagcagattattaattccgcggtcaagtataaccgtaaggtcgctgtgtcaggacgaagcatggaaaacgtaatatcggcggcaatagagcttgagtatatgcacgtgcctgaaaatacactgattggtttagatgagataaacaagtatcctaaagaacagcttgttgttataacgacaggaagtcagggagagtcaatggctgctctgacaagaatggcgtttaccagtcacaaaaagattaatatagaaccgaatgatttggttatcatttctgcaagccctatacctggaaatgaaaagtctgtagccaatgttgtgaacgagcttttaaagcagggagcagaggttatatatgaaaaacaggctgacgtccatgtttccgggcacgcctgccaggaagagctcaagatgatattgtctttagttaagccgaaatattttattcctgttcacggagagtaccgtcatctttgcaagcataaaggtcttgctgttcacacgggtatagaccctaaaaatatatttgttatggacttgggtaatgttttagaattgtcgcgctcatctgcaaagatagtgggttctgtgccgtcaggcaaagttttggttgacggattgggtgtgggcgacgttggcaatatcgttcttcgtgacagaaagcatttggctgaagacggtataattatagtggtaatgacaatagaaaaagagagcggcgagtgtgtttcaggacctgatataatatcaagaggttttgtttatgttcgggaatctgaagacttaatggaagagattaagaaacagacaacttctgttgttgaaaattgtttatcaggccacagttttgactggactactctgaaaacaagagtaaaaaatgatgtcggcaactatctatatgtcaaaacaaaacgcagaccgatgattcttccgataattatggaagtatagaatatttgatatgtaaagttttgcgtattagcccttgacttatttggactcatatagtacaatgaaaattgatgtataagaactatatgtcagacagttcattagtaccatcctgtctaaaaataaaactagggcgagttttgaatattacgtaaatctgtgcatattaacataaaattttaattgcattgtttcgtcaataaacaaaagacgctctgtcagagcgtcttttattattataaattatttaaataaaaaaggagattcggatatgtatacagtttcgtgtgaaacgcattttgattcagcacattttctattaggttataaaggcgggtgtaaaaacattcatggccacagatgggttgtcagcgcgtctgtcagcagtgaaaccctgatagaggaaggcggaaaccgaggcatggttatagactttaatgaagtaaagcctgttttaaatgaactcgtagaatgttttgaccacagacttgttgttgagagagatacgcttcgcagtacgactatgcttatgcttgaggaagaagagtttgaggttgcagaggttgatttcagacctacggttgaaaatttttctaagtatttttatgatgaattaaaaaagcgcggcgttcctgtatccaaagtaagagtttatgaaactccggaatcttatgccgaatactgtgaggactagtatgaatcatgacagccaggcgtttaaagtatgcgagaagtttgtaagtataaacggtgagggaattaaagccggacagctttctgtttttgtaaggtttaagggctgcaatcttgactgttcgtattgtgatactaagtgggcaaatgaaaaagacgcggattttgagtctatgtctacagacgagatagttaagtatgttgttgaaacctctgtacagaacgttacattgacaggcggcgagcctcttatacagcccggtatatccgggctgataaaaaacttgaaggaaaacgatcttaatgttgagattgaaacaaacggcgcggttaacttgaagccgttttgttctgacgaaacgcgtcccgattgttttacaatggattataaactcccctcgagcggtatggaagacagtatgctgactgataatttcttttatctgaaagacagtgactgtgttaagtttgtggccggttctgaaaatgatttagaaaaagctctcaaaattatacatgaatatgatttgacaaaccgctgtcatgtttatatcagtcctgtatttgggagtatagaacctgtcaggattgttgagtttatgatagaaaatgttttaaataatgtaaatttgcagattcagatgcataaggttatctggaatccggaagaaaggggagtataaatttggctgagaataagaaaattgacacaaaagccattgaggagcatatcagaggaattttgacggctttgggagacgacccaaaccgtgaaggtcttgccgatactccaaagcgtgtggctagaatgtatgccgaagtttttgacggtatgaattatactaaccatgagatagctcagatgtttaataaaacatttgaggacgatccggattcatatcataactcaaacgatattgttgtggttaaaaatattgaagttttcagtttttgcgagcatcatatggcgcttatgtatgacatgaatgtttcggtggcgtatattccaaacggcagagttataggtctgagcaaaatagccaggatagctgatatggtggcaaaaagactgcagctgcaggagcgtataggttctgatatcgctgaaattatgcaggagattacaggcagtgacgatgtggctgtaataattgaagccagccatagctgtatgaccgcgcgtgggattcaaaagccttcggcaaaaactagaacacgtactatgagaggaaagtttgagagtgacacgagcttagtcactcagcttatgggagagtagagtaggagacgataaaatggataacaaaaaagctttggtgcttttcagcggaggggttgacagcactacagcgcttgcaatggctgtgaaaaagtatggcgctgataagactgcggcgctttctgtttcgtatgggcaaaagcattcaaaagaaatagaagcggcgcgtaaaattgccgattattatggtacagaattactagagctggacctttcaaaaatgtttgaatacagcagctgttcgcttctaaagcagaatgaggatgctgatattcctaaagaaagttacgaagaacagctgaaagatgctgacggcgagccggtatcaacatatgtaccgtttagaaacggtctttttttagcatctgctgccagtatagcgctatcgctggaggctgagataatttattatggagcgcatagcgacgacgcggcgggaagcgcttatccggactgcagtaaagtgtttaatgacgctatgaatactgcaatatatgaaggcagcggacataaaataaagatattggcgccttttgtggaatggaataagaagcaagttgttgctgagggcgtgaaattgggagtgccgtacgaaatgacgtggagctgttacgagggcggaaatgagccgtgcggtgagtgcggaacctgccgtgacagaagagaagcatttttggctaacggtcttgatataaaatagaggtgatagatttggagaatattcaaagagagcaggaaggtttgactttgctgggaaatcagaaaacggtatataaagcagattatgctcctgaggttcttgaaactttcgagaataagcatagagataatgattattgggtaagattcaactgtcccgagtttacttcgctttgccctataacaggtcagccggactttgcggaaattattatttcctatgttcctgatgtaagaatggttgaaagtaagtctcttaaattatatttgtttagttttcgtaaccacggtgattttcatgaggactgcgttaacaaaataatgaaggatttgattgagctgatggaccctaaatatatagaagtatttggcaggttcacgccgagaggcggaatctcaattcatccatatgcaaactacggcagacccggaacaaaatgggaacaagtggcttttgaacggcttacacacagagaaatagtataagaaagttttcaatttgctgttgtggaaattgaattcagtattataatgtataatagtataagagtttattagataccgtttttaaaaagattttttcttgttatgcgggatatttgatatgagaataaaagtttgtgaggttacaatatgaatgaaatatatgattatcatattgttacagatagttctatggagaaaggtcagcatattattttcaatgatgttaattatagcggcgtttataaaagagtaaatgataaaattcaaattgtgaaagatatttatatatcccgaaaaatataatgcggatttttttgaatatcatacgaaggtagcaatgagagaattagcattagaaaaagtgcgtaaagatctttatcttgagtatccgtccagaatgagctgtttatatgtttcgaacagtatagaagaatctgaaaaatgagcggatctgtttattgacttaaatataccaacttattttattgttaaactgaaaataataggaaacatgtttgtaggcgatgccaataattgttttgaagcaactttatataaagacaaaaatttattgcttgcaaaacggtactggaacaactgtcctaatgaggatggtgttccttcaataaaggaaatattagtaaatggtgatattaaggttattgaaattataagagaaataaatgcaaatgtataattatagtttaaagctgagccatagtttccgttaataaaaaaattttccaagcttttttagtttgatgataggtatataagaataatatcgttattatttgatagcgaatccggattttttattattagtaaaaaagttaaaatatactaataatattgaagtgtcaaatgtcttaactagcgtgcgttttaataaaatataattatacttagtctttacgtgttgaaatcggcagttatatgtataacaacgaaaaaatcaagtttcagaacttttgatttttaagaatagattatattattgcatatatgaatattatgacggctttttaaagccgtttttattgtgcttaacttatagtcaaaaattttgaaaattaaagtcaaaaaccataacatcactattgtttaaattttatatcaatggtataattatcctaataattattaataaggagataaaaatggatactgtagaaacaaaaaattttattgaatccgggcaggcgattcttggaattgagtttggttcgacaagaataaaagcagttctgattaaccgtaatcatataccaatcgcttcaggcgcacatgactgggaaaacagattggaaaatggaatttggacgtatactcttgatgatatttggtccggggttcagaaatgctatgctgatatgtgtgatgatgtttataaaaaatatggcacgaaggttgaaaatctttctgctataggtataagcgccatgatgcacgggtatatggcgtttgataaaaatgatgaacttttggtgccattccgtacttggagaaacactatcaccgctgatgcggcaagccgtttgacagaactgtttaatttcaatattccccaaagatggagtattgctcatttgtatcgggcgattcttaatggagaggaacatgtaaatagtataaactacctcacaaccctggccggttatgttcactttgtgctgacaggtgaacgtgttattggtatcggagacgcgtcgggaattttccctgttaattctgaaactaaggattataattcagacatgattaatagttttgataaagtgatttctgaatataatttttcctggaagctgtcagatattttgcctaaagtattggttgccggtgaagaggccggagtattgaccgaaaagggagccggaatgcttgacccgacaggtgctctgaaacccggagctcgattctgtccgccggagggtgacgcaggaaccgggatgactgcgacaaacagtgttgcgaaacgtaccggaaatgtttccgcaggaacatctgtgtttgcgatggttgttcttgagaaagaattgtctaaagtatattctgaagttgaccttgttacaaccccgtcaggcgagccggtcggtatgattcactgcaataactgcacttctgatataaacgcctgggtaaatatgtttaaagagtttttgacggctatgggatttaatgcagatatgtccatgctttataaaacattctttgaggcggctttaaagggagagccggattgcggcggactgcttgcgtataactatttttcgggcgagcatataacaggatttgaagagggtagacctattcttgccagaactcctgaaagtaaattcagttttaacaattttgctcgggtttgtttatattctgcgttagctacattaaaaattggattggatataatgctgaacagagagggtgtgaagcttgaaaaaatgcttggtcatggcggattctttaaaactcctgaggtaggacagagaattatgggcgctgcgattgatgtgcctgtaacagtaatgtcgacagcgggagaaggaggagcatgggggatagctttgcttgcagcatatgtaatagagagaaaagataacgaaagtcttgatatgtacttggatgaaaaggtattcgggacagatgccggcactaccattgaaccacgagaagaagatgttttagggtttaataaatttattgaccgatataaaaaaggtatctctattgagaaaacagcagttgaaagtttaaattaattattgatataaatatatttttagtaaaaataatatactaaatattttgatttgttttataaatatagaaataagctgtctattgttggaccaacctcaaaaagttagattaaaagtctgacaattggaaggccggctaatatttgacagcttatttttattaatatataaagtaaataatagcggaaagtcagctgaaaaccggacggaaaaattaaaggtgtttttagtgaacatcggtaggcttgtgttaacaagcgcgttaggtgagctaccatctgaacacgcagtgttcaatatataaagtaaatatttattaaaatttactttgtatatgaccccatataaaaaaattttttattatataataatgtatttgaatcatttaattattacactaaaaaagcgcgtttttcagtgaacttcggtaggtgtatttgtgaccacactgaaggtaggggtcacagacatagaaggataatcaaaacaagtcactgtatattagcagacagagttttattctgttgcattttttataaatggaagacccttttggaaaagctgaataattacgttcaagtagtttttgttatattttatttaattaaaataagctgtccatttaggacagcttatttttaaaatttggagcggaagacgagattcgaactcgcgacgttcaccttggcaaggtgacgctctaccactgagccactcccgcatatatacactttttaatgcttaaatattataacatgaagtcagttatctgtcaataccttttacaattttttattatattttatttacgtaaaattattttatactaaaattatagttctaacgatgaaactgattataaatatttaaattaaaattttattaaaaagtctattgaaaacaagtcagtaaaaaatcagcggctccgtaaagagccgttggatgtgaatagtaattttaaccgccgaacaatccttttaccttatcaattatgccttcagcttgattttccaaattttctacaacgcttccgttagggtcaagctttgccttcaccatgtcagctatattttttaattgttcgtccggcaaatcaattccgataagaccttctattgttttgattgggtcggatttaaagttgtccatcaatccagcatcagattgaagtttctcaacggcttctttggctttgtccataatttctgcgatttccataattaaacctccttaaaatttaaataaactgcttataaatatattttaaataaaatgtataaaaatgtcaatataaaattgtatatttaattaaatatttttaatatattcaaaaactattgcagcgatattgatttattaggataaaaataaggattttatttttaatagtataaatggcctttatataaagatttggattttaatacagtatttttttaatatatgttatattaaaaatttttaaaaattatagaatatatgaagtgaaacattatgaaatgttcacgctgcgcggaatatgaccggtcactcagcgggttgtgtaaacacgcaatacgtcaaactaagtcttattatatgacaactaagttaattattggcgtttatagtttatataatatacatttttgtttaaaagtgtagtcacagacattgaaggcttaaggataagagatacgttggctcacacctacccacaggtaggggcatagtacacctgccgatattcactaaaaatactgtcgccgtataataaaaattaataaataaattattatacttgaatacacaaaattccattacatccgctgtacatacttagaaaagtttgttatacttttttcgattacaaacttttccgcagctgcgcgccttacgcggcagatttcatctgcattgagtattcatattattgacattgtaggtaaatcaaaacaagttattttgtattacatccaccttttcaggtggagtcacacctatcgaagcttgctatactgcatttttattcaatttttaatttctttatattgtaaacacacttaacgtttctgtatagttttctgtttacttttcagtttattcagaatatgaccggcagttctaactcgcattatattaattgattattgcggaacatggtttaaaatatgtaaatgaagtgaacctgtatggattatatagagaaggtaaattccttttatatagtaaagattgaaaatttattgattaagattaaaaagcaatttcattgaagatttcatgatatattaatttttataacaatgataaaagtacatataaataaaaggaatgaattaggtattgtacctaattcattcccattaaagctaataaaaatctgtctaaacttttgggttcatttcaaattgaatcctgttctgtaatattattttattttgtattctttttaattttgtcccaatattcttttgcggcctgttcgtttttattatttgcgtattcataatactttttatcttttatattgtcaggtaaatactgctgaacaacataatggtttggataatcatgcggatacagataattctgtcccttttcagcattcccctcaccgtcataatgcttgttttgcagctgtcttggtattgagccggtgtctattgtttctatatcacgaatagcgttgttgattgccatataggccgagttggatttgggggcggtcgccagcagtacagcggcttctgccaaaggaattcttgcctcaggaaagcccagcatgagcgcgctgtctacacaagcctttacaatcgtaatcgcctgcggataggccagtcctatatcttcacaggctataaccataagacggcggcaaatcgactggatatcatcggcctcaaccaaccgtgcaagatagtgtaccgctgcgtcagggtcgcttcctctgatagatttttgcagtgcgctcatgacatcgtattgactgtcgccttttttgtcaaacttaaatgactttttttgagtacattgctcagccagctccatggttattttcaggttgccctcgctgtcgggaggcgtatacataaccgccagctccaaagagtttaacgccttgcgaacatctccgccggctttttcggctaggtgacgcataacgccgtcttcgcatattatttttgtatccgggaaatcatcggtttgaattttttcaagcccgcgttctaaagccacagaaatatcatcaggggtcaaaggcttaaactcaaacactgtagagcggctgagtatcgcgttataaatatagaaataaggattttcggttgtgctggctatcaaggtgatttttccgttttcggtgtattcaagcaaagattgctgttgttttttattaaagttctgtatctcatcaagatacaaaagtattccgttctgtccaaacagcccgtcgctctctctaacaatattttttatatccgacacggacgcgtttgttgcgttaaggcgatacagcgccttgtttgatgatttagcggctatattggcaactgtagtcttgcctgtgccggacagtccgtaaaatatcatgttggggatatttccgctctcaataatatttctgagtatgcggttttttcccagtatatgctgctgacccacaacctcgtctaaggttgtgggtctgagtctgtccgctaacggtttattattaagcatagagtgggtgtttgtcacaaagagcctgaacacgttttttaacgtcctctttgtttccttcaaaatctttgataatcaacgaaataagttctgcaacttcaaccatgtcttcctctttaaaaccgcgggtagtaacagccggagttccgagcctgattccgcttgtaacaaacgggctcttagggtcgtttggtatggtgttcttattacaggttattccgacctcatccagcatcttttcaacttctttaccggtcaaatcctgctttatcaggctaaccagcatgagatgattgtcggttccgcctgaaacgatttcaagccctctctcctggagtgcttcagcgagagcggaagcgtttttcttaacctgcttttgatattctttaaagtcgtctgacagagcttctttaaagcatacagcttttgcggcgatcacgtgcataagaggtccgccttgatttcctgggaaaacagctttgtttatcatcggaccatatttttctttgcaaagaatcatgccgcctctaggacctctaagggttttgtgagttgtggtggtaacaaagtccgcataaggtactgggctttggtgtaaacctgccgcaaccaatcctgctatatgcgccatatcaaccatgagataagcgccaacctcgtcggcgatttcacggaagcgtttaaaatctatttctcttgcgtatgcgcttgcgcctgacaatataagtttgggcttgtgttccaaagcaagctcacgaaccttatcatagtcaatgcggtgcgttaccgggtcaactccgtatggcacaacgttaaaatattttcctgaaatatttaccggtgaaccgtggctgaggtgtccgccttcagcaaggctcatgccgagataagtgtctccgggctccatagctgcaaaaaagacagcaaggtttgcggttgctcctgagtgcggctgaacgttggcaaattcagcgccgaacagttcctttgcgcgctctctggcgaggtcttcaactatatccacatattcacagccgccgtagtaacgcttgcctggatagccttcagcgtacttgtttgtaagcggagtgcccattgcttcgataacggcttcgctgacgaagttttccgaggcaataagctcaattttattgcgttgtctgttgatttctttttcgattgcctcagtaacttcagggtcaaccgattttaggttttcaaattcaaacatcaaatagtcctccaaatatattatttttattatttacaaaataaatgttgaaaaaaacatacattcatattataatgttaaaaatagatttttgcaaggggtattttaaatatgagggaaaaaattgctgataaaaaagagagaatattaaaaataattgagatatttggaaaagtgtacagtgacgcggactgcaccctggaatatgacaatccgcttcagttactcatatccacccagcttgcggcgcagtgcactgacaagagggtcaatatagtaacaaaggatttatataagaagtatagggatgtatatgattttgccaatgctgacgagcttgagcttagagaggatattaagtctacaggctttttcaggaacaaggcgaagaatataataggctgctgcaagatgctgatatctgattataacggagaagttccacgtgaaatggaagacttgctgaagcttcccggcgttggtcgaaaaacggcgaacttagtcagaggagattattttgggataccggggatagttgttgacactcatgcgaccaggctttcgaacaggttagggctcacgacaaacaaggacccgaagaagattgaaatggatttattaaagctagtgccggaagaatatcagacgtctttctgtcaccagctagtgtatcatggaagggagtattgtcctgcggcaaggcctaaatgtgatatatgtcctataagcgaattgtgcccaaaagttggcgtatgattttttattcattaaaaaaattatatatctactatgtatatgaccccatataatatatattattttacttataataggtgtttgaaccatttctttttctggcaagaaaaagaaacgcttcacctgtgaccacacctgaaaggtgtgtgtaataaaaagttacttgttttgaataacctacgatgtcaataatatgaatactcaaataaaagaaaaagtgcttgctcgcttaggtcgcctgcggctccaaggggcgctcgcccccgctaatttcatcttgaatctgcgcttcaagatgaaaaagccttgtaactttcccgttgactatgtgtactgccgtgaataaagatattccgagttcttatttctttaattcacaaaaatgctgagggtcagcgagcatcggtagggcgcatttatgcgcctcgttaggtgagctatcatctgaacacgtagtgttcaatatacaattatctttattataactatatacatagtaaataaaaaagcacctgtcattcgtgtttacgtaataacaggtgctttagtcttttttaatatcatttagaatttcaaaaaaataatctaattgacgtggtgacaaggaaaataatatattcaatatcttttgtattttatcatcatctttaatataataattaaagaactcatatggtgtaacttctaaaaattcacaaatataaaagaatccacttaatgatggtaaagaatatccggattcaattttatttatatatccttcactttgaccgataaactcattcatccggatatgagttaatattattagtgcgatttaataagtaatcggttgaggtattgtaaaagtcggcaagtttcactagaaaatgtagaggtatagtttgaaaacctcgctcataacgagagtatacagtttgttgtattcctaaaatatcagcaatatctgtttgttttagtccagcatttatgcgcagaatttttaatcttttcaagtacattttaacatatcctccattaaacttctgagttttaatcttgttcatcaatattaaaataggacgagggcaaattaagattaagcaagtcgccgggtttaacctctaaaatatcggcaatattaaagaaaacttctaaagagaaggaagaagatatattaggagcttcaatagagctaagatgtgaacggctaatatgtgctttctcagcaagttcatgttgtgtatatcccttagcttttctcaaagcagaaatcattaatcctaattcaacgaatcggtctctgttttcaaaaccaacttctttacgcatttttatatcctcctaaaaaattattaaatatgtttttgtatattgaacactgcgtgttcagatggttgctcacctaacgaggcgcataaatgcgcaatacatcacaactaagtaatttattggcgtttaaggctatggcaaaagaagtcactttgtatcacacccaccaaaggtggggtcacacctaccgatgttcactgaaaaaactgtctttttgtactttagtctaaattaaacacccaacttttctttaaattaaaataattggaactcggtaaatctttattcacggtagtacacaaagtcaacgggaaagttacagggctttttcatcttgaagcgcaggttcaagatgaaattagcgggggcgagcgcccattggagccgtaggcgacctaagcgagcaagcactttttcttttatttgagtattcatattattgacatcgtaggttattcaaaacaagtaactttttattacacactaatttcatcttgaatctgcgcttcaagatgaaaaagccttgttactttcccgttgactttttgaactaccgtgaataaagattttccgagttcctgttgatttactagtgatttactaattaaaaaaacaagtttccagtataaattaatacaaaaaaactaggttttgagtgaactacggtagggcgcatttatgcgcctcgttaggtgagccaacatctgaacacgcagtgttcaatatataattaacaatttataaataaaaaatattcttgacaaaaatagaaaaagagaatataataaaagcagataaaaggtaaccgttaaacggttgtcaagagaaatatttgtttataaatataactgtcctgaccagaggacagttatattgcttttatggacactattataaaaattattataatagatataattactttaagtaagtatttccacataagcgacacctcctttctgctgtaagtaacagcatacggagatgacaaccgtcctacaattcccttttacccacttgatataattatatacaatttatcgaataaagtcaaattaaaaatcctttacatatattcacatttattaaaaacattcttgacaaaaagaataaaagaacataaaaaatataaataaaaaataaccgtttaattattgccaaaagatttagataataaaatatagccgtccttttgtaacaagggcggctatatttcttttaatgaaaaaccaatcattacatattggcttcaatgcttatttcttttccggttaagtattcaagaccgcctgactgtgacttgaatccaaacaccagcttatatgcggaaaggctctgatattttcctccgccgtcagattttgccccatattttttatcaccaaccaacggatgcccgtaatgagccagcgttgccctgatttgatgggttctgccgcttagcagctccacttctaaaacagacgcgtttccctcatattttataactctatatttaagcgccgatggtttcgctccgtcaatccgattctcactgaattttaccctatcgtttccgcactttagtatatatccctcaagttttccgctctcaggcgtaactcttccctccacccggcagatgtaaaacttcttaatttccctggtcttaatcttttcggttattatcctatgcgcctttaaattttttgcgcctataactaatcccgaagtgtttctgtctatcctatggcagagcgacggaagataagtcccgtttaaatccagttcgccgcgcttatataaatacgcccgaaactcgctttcaagcgaatccgcatcatcgccgctgtcctgagacttcatacctgacggtttgttcattacaactatattttcatcagtatatacaacagaaatatttccgtcacagcctaaccacttatcgtcattatctgcgcctttttcaaaaaattcgtcgttaatataaagttccaatacgtctccgccgtcaagctgaacggtaccgtcagttgtccttttgccgtttacctttatccgctttttcctcagagacttataaataatgcccgaaggtgcatcgggcattatcttaaataaaaatttatcaagccttataccgctgtcggctttggatattttaactgttctcatattcttcctctttcgctctgagcgccaaatcttttattacctctcctgcaattatcagacctgcaaccgacggcacaaagctgacgcttcccggaaccggtttattattttcactgtcatacaactgtatttccggcttctttgccttttcctctgaatataccactttcagcgatttaatatcccggcttttcagttcccggcgcatcacttttgccagcggacacatcttagtcgaatatatatccgcaaccttaaaagctgtcgggtcaagtttatttccggctcccatggcgcttattataggaacacccatcttgttgcacctgcatatcagttcaattttggctgatacggtgtctatagcgtcaacaacatagtcatatttatcaagcggatagtcatcggcattctcgggcagataaaacaccttataggcattgacctcagcacaaccgtttatatcgagtatacgctcttttataacatcagccttgtattttcccacagtgctgtgaagcgccgctatttgacggtttatattgctcagcgacaccctgtcgctgtcatataaatctatgcttccaacgcctgaacgggccagcgcctcggctgtgtagcctccaactccgccaactccgaatacagccacttttgaatttttaagattctcaactccgtcatatccaagcagcatttcggttctttgcatctcttctctttgaatcctggttccttgaatctcgtttccttgattctcgatactttgattcttgatactttgattcttgatactttgattctcaattccttgattttcgttcccttgattctcagttccttgattctcggtgctttgcatctcttctgacattatactttcccacatctttcattgcctgataatatctttttaaactttagagcaaacatcagcgcggtaaacaccacggccaaaaagtctgaaatcggttccgctaaaaataccgcgaacactttcactatattccctccgctttccaaaagaggcggaatattatccggcgtaaatataccggcaaatccgggagttataatattcggcagtataaaaattaatggtataagcagaacgatttttctaagcagtgccaaaaatattgaaactccggcctggtttaatgctataaacgtctgctgacacgctatttgtataccaaaaatacatacagaagctatataaatcctgagcgcccattcagcaaacgtaacaagacttgggtcgttgctgaacattcctaccagaaattgaggggcaaacatacacaccgaccagaataacaatgaaaaaataaacgagaacaaaagcaataagccgaatgctttttcaaccctctttttgttgccggctccatagttatagctaattataggctgcgcgccctgcgtaagtccctgaagcggcatcatagcgaactgcattgcggttgctagaatagtcatagccccaaccgctatatctccgccgtactgagccagcgagaaattaaaactgaccgtcagaatactctcggtaaactgcattataaacggcgacagtcccagcgccagcactgggagcataatttttttatcaaagcccaggcaggatttccttattttcaaaacactctttttacctgacaagaactttattacccacaccgctgaaacggcctgggaaataactgtagcaatagctgctccgctgacgcccatattaaacccgaaaataaaaatcggatccagtattatattaataaccgctccgattactattgtcagcattgcctttgtagaaaagccctgtgttgtgataaacacattcattcccataacacattggacaaatatagttccaagcgcataaatcctgatataactcattccgtagcttaaagttgtgtcccggtttccgccgaacatcaaaataaaaggctccgcaaaaatcaaggtcagaactgttaatatcaccgctattattaccagcgttgtcaaacagttacccatgattttttcagctgttttattgtctccctgacccatgcttatagcggcgcgaggtgctccgcccattccgaccaaagctgaaaatgccgttatgataactattataggaaatgttacgccaactccggtcagcgctattccgcccacgtcgggaatatgacctatgtacattctgtcaaccacattatacagcatattaattatctgcgctataatagtcggtatcgccattttgagcataagctttcctatactgccggttcccaaatcatgtccgccttttgccggctctgtattttctgtattctcagtgttttcagtagtttcaacagactcagtatattcagtgctctcaatattctcagtgctattttctgtgttttcaatagattcgttatttttattttccattatttcaagtcctatcaattaatttatattcgtcttaaaacatcttttctatgaagcatttcatccaggcgctcaatatagtccttcgcttctttaacgttaaatatccgctctatacgttttgtctcaaggtcaacagttttggtcacaccgccgcagcccaaagagattatagtctgtatctcctccataatataaagattatagagagactcgaacccgggttttgaatacccgacattttccaggtttccaagctgatttttctgtcggtacatataatacggaaactttcctctctccgccagatactttctggcatatgacaccatttccgcaaccaactcgccttttgccaaatcgtactcgtccaaatactcattcagccttgacgaccgctttatactcattgtatgtaccgtggtatcctcgggttccagcttctcaacctcgcttaaggtatacttaaacatttccatatcctcacccggcagacctgcaatgacgtccatgtttatattatcaaatccgcagtgccttgccattttcatagcttcacgtatatcatcggcgctgtgtgccctgccgattattttaagtgtgctgtcattcatagactgtgggtttatgcttatcctgtccacattatacttctttaaaacctttagtttttcttccgttatggtatcaggacgacctgcctcaacagtgaattccttcatttttgaaaggtcacaattgtcatagagacagtctatcatctcttcaagcaacctgggcgtaagagttgtaggagttccgccgccgatatatacggtttcaaccggggttccgttatggcttattatatcagccgtatactttatctcctttttcagcgcctctatatactcaggcataagagccgccgcctgctttgtgccgttggtaacaaaagagcagtaaagacacctgctcgggcaaaacggtatacctatataaatgctcaccccgtcttgatacatatcatcacgtatcggccgcaatgctctcgccgcctctaaggcaagagacgctttttcatatgtggtaccgcactcatttataaaataacttattacctcatcatcgctcatgccctcgtcaaggagtttagtggcaattttagccggacgtatacccgtcaatattccccaaggggattttgtttcatctgtaatttctgacataaatatactcctaatcctatctcaagtatgggtttccgcggcgctcgtctccaactgtagtaggttccccatgacccggatacagacgaacactgtcgtcaaacggcattaactttgtcttaatcgactgaacctcctggctcatatcacctgtagggaaatcggttctgccaacgctgaatctaaatatggtatcgccgcagaaaactttcccgtctataaccaaacagattccgtctattgtatgacccggtgtgtaaataactttaaactcatcatttccgaacggaataacatccccgtcttttaacgcaatatccgccttaaaagtttcttcttttctgccaagctcaccggataggttaacgcgcggctcgcctagaacctcagcgcttttttcatgggcgtaaaccttagcctcaggctccgcttctaataacccggacagtcctcctatatggtcatagtgaccatgggtcaggaatatttttttaagcttgcagccattttcttttattaaattcaaaatcgacttatggtcggctgacggatctataaccgccgcttcaccgctgtcttcatccaagaaaatataacagtttgttgcaacaggtcctaaaatcaatctttttattatcatagcaccatatcctttataattatttactgtctgcttctgctgaccgatataactccgctgagcgctttaagctttctctttatagtgtcaagctggctcgtatttgaaatttcggtcgttatttctattatagccaaatcgtttctgccggttctagcgttaacattagttacaggcgcttttgcatcgtttataacagtcagtatatcaaccagcagattaaccctgtctgaagcggttatcgtaatcatcgactggaacgaagacggcggagtatcgcctgcccaatgaacagaaatcaatctgttccgctcctgctcagacgcagcggcatgtatcatattcagacagtccgctctatgaacggcaacgcctctgccgcgagtaacataaccgactattttatctcccggaaccgggttgcagcagtgtgaaaacctaaccatgcagttatctataccctcaaccacaacgccgcttgtattgggtttggctgtggtcttcaccttcagcggaacattgagctctgccggagtaagctccatttcctgaagctgtttatttttgcattcggtcagaaacctggttacaaatcgattagcgtttgtgcttccgtatcccacagccgcatacaaatccattataccgttaaatccgtatttctttagtaacgggctaataaaggattcatcattaatatatttgacaggaatactgtttttagacagttccttttctatagtctcttttcccttttctatattttcctcacggtttacctttttaaaccattggtttatcttgtttctagcctgagacgtcttgcagattttaagccagtcaattttcggtccatgcggaaccgaactggttatgacatcaataaaatcaccatttttaagctcgtgcgaaagcggcacaatctttccgttgacttttgcaccggtcattctattgccgactgcgctgtgtatcctataggcaaagtcaattggggttgagcctgcaggaagactgacaacgtcgccctttggtgtgaagacaaacacctcgtcgctgaacatatcaatttttaaggtgtgcataaagtcttcaggactggtgctgtccttttgaatttccagcagatttttaatccattccagcttgtcgtccatatcgctggaaccgcttttcccctctttatacttccagtgagcggcgataccgttttcagctatttggtgcatttcccatgttctgatttgaatttcaaacggggtgccattaggtccaataagcgttgaatgaagcgactgatacatattcggcttaggcatagctatataatctttaaaccttccgggcatcggcttgaacagttcatgaaccatacccagcaccgcgtaacagtctgaaactgtatcaactataacgcgaaccgcaaataagtcgtaaagctcgtcaatagttttattctgcataaacatcttgcggtatatactataaaaatgcttggctctgcctacaacatgagcttttatatgaagttcatccagcttcttttgaagtatttcgataatctcgccgatatacttttctctttcttcacgcttctgagctatattgtcaactatctcataatatcctatagggtctatatacctgagcgacaagtcctctagctccatttttatctttgacataccaagcctatgagccaaaggggcataaacttccaaagtctccctggatattgccctttgacgctcctcaggcatatatttcatcgttctcatattatgaagcctgtcggccagctttataactatcaccctgacgtcttccgccatagcgaaaaacatttttctcaaggtctcaatctgctgttcctctttagaagagtatggtattttatcaagctttgtaacaccgtcaaccaacagagccacagtctccccaaattctcggactatatcctctctggtggagtcggtatcctccacaacgtcatgaagcagcgcggcaactatagactccacatcaaactccatttcagcaattattgaagcgacttgaatcgggtggttaacaaaaggctcgccggattttcttgtctgcccgtcatgcttttcgacagcaaaattatacgccttttccaccatggacaaatcgcctgttttattatattttcttattaactctataagagtagaaagctcgttacctttcataattcatcactcgccatatagcagtttgaaccggtctcatcaaaaaggtatgctaaacgcgatacatctaagatacagccggttcattccatatttatttatataattagtatttcttttatcttgcgtctttaaactccgtttttctcatatctttcaaaataagctgaacattttggaagcctttatagtcgttaatatcaagagcaaaagcaacgtcaatatagtcgccttccctaaacatactataataatctcccattccaaaaccaacggtatccaaatactttccgtccttataaagggtcatgcgcagatgcttgccctcgctcatcacactgattctgtgaatctttatattgcgaacagaaaacgatggcgttgggttgtttactccaaaaggctgaagcttatttatatcatgaacagtatctatcgttatataaggaaccttgatttgagcgtccagagatatagtaggaacaagagtcatatcctcaatttttccctttgcatattcgttaatcttttttctgaaagcctcaatattctcagccttaatagtaagtcctgccgccagctcatgaccgccgaacttttctaaaagaccgctgcagttttccaaagcgccaaacagattaaatcccgcaatacttctgccgctgccctttgctgaatctccatcaaccgcaaacaaaatagacggtttataatatttttcggtaatcttagatgaaactataccgacaataccatggtgccagttctcatgaggaataaccaaaatatcatcatccttaatttcaggatgctgttcaatatattccagcgcctctttaaacatcttctgctcggtctgctgtctcagcgtattttcgtgacagagagaatcagccagcttagccgcctcctcttcatcttctgtaaggaacaattccacacttgtggaagcacagcccaaacgtccgctcgcattgattctaggagctatagtatatccgatagttgaggttgtgattgccttgccatttgtagacacgtcaatcagtgcttttaagcctatatttttagtggtcttaaatctctttaatccttcggttacaatcacacggttctcgtctataagcggtgaaatatcagcaaccgtgccgagacacattaagtccgcatattcatccatcagattttcgattggttcagaactgtcaagcgcctgtatcagcttaaacacaacgccaacgccggcaagacttttaaacggatactcacagtctttcctcttagggtcgatagccgcatatacgtcaggaatactttccttacactcatgatggtcggttattataaagtcaataccaatagacttagcataatcggcttcctcaatggcggttataccggtatccacggttataataacagcggtgccgtcagcctttatcttgtcaagagcgtccctgtttacgccgtatccttcaaccattctgtccggaacataaaatcccacttccaaacccatgtttttaagatacttataaagaatcgctatagatgtgattccatcaacatcataatcaccataaatagtgattttctcattattctttttagctaaaagaattctttcaacagccttatccatatccttcatcaggaatgggtcgtgcataccgctcaggtcacgggcaagaaaatcttttatctgcccatcttcacggataccacggttataaaggataatcgcggttaaaggtgaaatattgaaattcttagaaatttcaaccacccttgccttatcaaattctttaagtatccatttcttctttaacatacaaatttatctcctaaataaaattagtttactaatttaaacagtcatttcaatattttatcattactttcgaaaaaatacaacaatttttttacaaaaaacaaaaattttaggaatttggtcaatataatacttttatatcactgttttacagataatcggctatttgagttccactatcgtaacgccgatatcgccctcgccgaacctgcctaagcggtattttctgacatgcggatgatgccgcagatattcatgaatccctgccctcagcgcgcctgtgccctttccgtgaataaggctgacttcactgaggccgctcaatacagactcatccaaaaacttatcaacttcaagctccgcttcgcctattgtcatacctcttaaatcaacttcggtctttccgctcattgcagtattgattcctgtcgacctctttggagccacatagctttcaggctttgaacccttttcatcttcaagcaccactagatttgaaatcttagcagtgattttcattatgccaacttgaattactgccgtctgattatctttatttatcgaaagaacagttcccttgtcatttaggtctataatcagaacattggagccaagtttcaaagtgtttaaattaacgttcgactttacgccgccgctcctgcgatttttggggcgtacattagatttttccttgagtttcagctctttgcgaacctcttccattgccctgacagcttccttattccgcttttccttttgaagctgttttatctcttcaagcattctctccgtatcttcctgagcctgctttattattttttctgctttcgctctcgcgttatcatatattttatcctttttcttatctatcttttcgcgctctctttgcagttcatctttgagctgctctatttcacggcgcatccgctcctgctcttctctagctttttgagcggaaaccctgttttcttcaatactgccgagaacatcttcaaactttatattctcatctgacaatttctcttttgaacgctcaattatactatccggcaaacccaattttttagatatggcaaacgcgttgctcttgccgggcacgccaatcaacaatttgtaagtagggctaagggtttcaacgtcaaactcgcaggaggcgttttctataccgtctgtcgaaagcgcgtatagcttcagttcactgtaatgagtagtagccacaatctttgcgccaataagcctgatactttcaataatcgctgtggcaagagcggctccctcaaccgggtcggttcccgctcccagctcgtcaaaaagcacaagcgaattcgagcctgcattctctactatatgaactatattcttcatatgtgacgaaaatgttgaaaggctctgctctatgctctgctcgtcgccgatatcagcgaaaacatcatcaaacacaggcatctcgctttcctcgttggccggtatgtgaagccccgcctgagtcataatacaaaataagcctatagttttaagcacaacagtcttaccgccggtattgggtcctgtaaccaccaaaacgtcaaaatcatcgcccagccgaacatctatcggaactatttttgacttgtctataagcggatgtcttcccttaacaatttttattttgccgtcagtattcaatttcggacagacagctttcatgtcaagagccagctttgccttggcaaaaataaagtctattaaaatcaaagtctcatagttatacttgacctgctctgatatttcagcaaccttgtttgacagctcatataataccttttctatctccgccttttcttttatctccagttcgtgcagttcgttattggcgtttacaacgctcgacggctctataaaaaccgtgctgcctgaggcggacatatcatgaactataccgggcacctcactgcggtgctcggctttaaccggaacaacataacggttattacgcatagttactatattatccatcaaaaacttttgatagtgaccggaacgaaccatgctgtcaaggctgtcctttattttggcacctgtatttttcatctttcttctgacattagctaaagcgggactggccgcgtccgcaatttcatcctcagaaacaatcgctctgtttatctcgtcctctataggtttagcggagacaagctcagaaaaatattcctcaagcgcccctgtctgttccttagtatatctctttaaatttctgatacattttaaaagcctggccacattaagaagttcggccgccgaaagtgcgccgcccacatcaagacgctttatcgctccgtcaaccggctctactcttaatatttcgggcgagccaaatttaagcgacatagtaaccgcagcatctgtctctgcaagcgccctttccacctcgcggaaatctgacgacggcttcaattcttctgccattgtttttgcgtcgtcatttttagcacactctgaaagcgactttaaaatttttgtatattcaagagttgataatgatttctcttccatctcatatctcccagatttaaattcaattttgaaaagttccgttacagcttattatcccggaaccaacaacttaatattatacacaaataacagcggatagtcaacacgcaccccgaatagtataaaattaatatattaaaagtaataaaaattgttgaaaattaataaaaatagtattataatagatttacagtgtgtcgaaaaagataaaaaacaaaaggcgtttaacttttaaattaattttataatttaaataaatctatttattataacataaaaacaaagttaacttctatatataataggagctacaatgcgtaaaaaagtggttttgagaaaaaaactgcataaacataataagctcctcagatgagtgaactgttatctaagctgagccgaaggatgaaaaacggctcgaaaacgctgtttactctccttgagaccactccgcagatgaagaggctaaaacattaacttttgtctatctgcaatatatacacagatatttgtgttgtaaatataattaattaaagaaaaacaggtcatataaaactagtcataattaaattaaaaaataataagcagtcttgtctataaattgaaattgtatcataaatataataaaaggagtgaattttatggcaaaatacaaatgtcccatatgcggatttatttttgatgaagaggctgagggaaaaacaattgatgaaatcgaattttgtccggtctgtaaacatccggcctcagattttgaactcattgaagaatcatcagatgagccaactgaagcaaacgaacctgacaaaattgaatcgtttaaaactgaacaggaaaacaaaattgacctttcataccccagagaatatgagcgacacgataaaacaataagatatatggacgagattcaccaaatggcggtgaccggaaaatccattatatcagctatgggtacaagccgtccaatgccgaattgggatgatatacttatactcggggcacagttcaatcctccgccgcttgacgaacacgcccatgtctataccacaacagtaataggtaaaaacgctaagcgcccaatggtcatagaaaacccggtatacatatcgcatatgtcttttggagcaatgtcaaaagagactaaagttgcgctggcaaaagggagcgcgctggcaaaaacggcaatgtgcagcggcgagggcggaattctgcctgaggaaatgcaatccgcctataaatacatatttgaatacgttcctaacctttacagcgttacggatgaaaacctaaaaaatgcagacgcaatagaaataaaaatcggacagggaacaaaacccggaatgggcggacatcttccgggagaaaaagtaacacctgaaattgccgaaatcagaaacaaaccgctgggtcaggatgttataagcccgtccaaatttccaaatatcaatactagagaagatttaaaaaatttggtttcagaacttcgggaacgcagtgacggtcgtccgatagggataaaaatagcggcaggtaaaatagaaaaagatttggaatactgcgtttttgccgaacccgactttataacgattgatggcaggggcggcgcaaccggagccagtcccgcaatagtcagggattcgaccagtgttccgaccgtatttgctttatatagggcaagaaaatatcttgattctgtcaaatcagatatttcattggtaataacaggcggactgagagtatcgtccgattttgcgaaagcgatagcaatgggcgctgacgcggttgctgtagcgagcgcaggcttgattgccgccgcctgtcagcagtatcggatatgcggaagcggtatgtgtcctatgggaatggcaacccaggacgaggaattgagaagccggtttaaagaggaaccggcagtattaagggttgctaatttcctcaactgttctttagaagagttaagaacgtttgcgcgcataacaggtcatgaaaatcttcacgatatgaatgtgtcagatctctgcaccaccagcagggagatttcagaatttacaaatattccgcactgctgatatgtattattatatttaaattttattaaaattgaaaagggcactgtttttcgagttacgaaaactgtgcccttaaattattttatttatatagttactaaactgctgcagttcggtatgacggcctagcccggttgcgctcgccggacccgagcgcgtaaactatttttttgacttactgtttgtaagttgaataaccaatatatataattatattattttgtttataaaaaaactatcctatatactttgtatatgaccccatgtaaaaaatttattattacataatagggtgtttgaaccatttctttttctcgtaagaaaaagaaacgcttcaccaaagaaaaagtactgctcgcttaggtcgcctgcggctccaatgggcgctcgcccccgctaatttcatcttgaatctgcgcttcaagatgaaaaagccttgttttttcccgttgactttgtgaactaccgtgaataaagatattccgcgttcctatttatttaattcataaaaaaagtcggtttttcagtgaacttcggtagggcggtataaccgccctacgccctcataaaataaaaaccgtcatatgcttgccattctcggtagctgtatgacggtttttattttttatttctcatttcttttattaattctaaaactaaatttttttgtttttgtgttaagaatttccattcatcatgtagttccataagctctggagaacactcaatcatatcatcttctgcaaaaaattctgaaagagaaatatttaaccccttacaaatcatttcaagtgttggaattgttggaatacttccacgcttaaaaatatttgtcaatgtttcctctggtattccgctgtttttagcaagcctataccgtgataaattttgtttttttagcagttcattaagtctatcctgtacattcaaaaaaatatcacctcttttgaactaatattttataacttctaatcattctcaacatctaaaaatttatatacactaacacctaatgccttgcctattcgtaaaagagtttttaaagaaggagcatagtgaaaattcgtaccttccaattgactaatatatacctgacttaaattagaggcctctgcgagttcttcttgtgtcatatttcttgaccggcgataatatccaattttcaagcccactcgaataacaaactcggcgtattccttttcaaaagctatactatcttttgtttgattattcttattgaccattggtatcacctcttttgagctaatattttataactaaatagactttctgtatactaagtaaattaaactatatacagtttaatttatttttcatttcttttacaaattgcagcattaattctttctgctttggtgttaaaaactttccctcactatatagctcattcaattctgatatgagttcaaccatatcattgtcagcaaaaaattgagatgaagtaatgttttaaccttttcataattctaaaagcaattcaatatttttctttaaatattctaattgcttgacatttaatttctcaatatttggtctaatactttctaaaaaaacatcaacgttatcatcagacaaatcctttgcaaatgcgtctgtcggaacatttaatgctttcgctatctggattaccatgtcaaaacgtggattgtgatatccttgttcaattcttgataaatgtttttgagatataccagttgtttcagcaacctgatcttgtgttagattcctttgtattctatatttttgtattcgttgccctatttttacaaatacaatattattttcctcttttttactatcatctttgttattcatcgttttattgcctttatatataatttaataatttcctctaagtcagcctgactttcagaatcaagttccgcaattagattttggattggagtattatttgtttttttacgctcgccgaacaaaatataatcagcatctacatcaagaactgtacttagagccattaatgtgtccattgaaataccattttcgccacgctctattgaaccaaggttattttcatgaatatttatagcttctgcaagttgcaattgtgttaatttttttgctttccggagtgctataattctacgaccgatataatattttatatttttcatttggtcactccttaacactatttatacaaatttattataaaccaatttatatccaattcgaacaacgactaggattgtaacccagcctatacattgacttttttgaaaaaactgttataatatttaataagaccatttatatacaaagtacatagatagcttttttaataaacaaaataatataattatatatattgaacactatatgttcagatgatagctcccctaacacggcgcatagccgccctacgcccccataaaacaaaaaccgtcatatgcttgccattctcgacagctgtatgccggttttttaacttatctcatttactgattaaactttttaattgtggcaatattttcacgaagcattttaagctgtttgtgattcatacccctaatctcatctaaaataagcttcagattagcctcatcattactgttatcatagtcagctatcaatgtatcaatggaaatatgcaaagctgttgtaattgcatacattgtatcaagttttactctaagctgtcctgcttctatctttgaaatatgcttttgattagttccaatcaattcagctaattgtgcctgtgtcatattattttgagtacggtaatactgtattctgtttcctatttctataaagtctaattcacatttcatattatatccttatagttacctaaattacataacgaaaatacaaaaagtgtttctgattttcaaaacttgccaataacgaaaaataaaaaccataatactgtttaccatttctattaactgtatcacggtttttgggagtaactaaaatttatattttttaattgaaagaatcatatcttttactaacgatagttgatattgactcataccctctacatcaccttttatattttgcaaaaaaatatttatattatcagcagacaaatcctcaataaaaatatctgtagaaacatccaatgcttttgcaatttttattatcatatcaaaatgtggtgcatgtatgcctctttcaagtctcgatatatgtttctgagatataccagtcatttcagcaagttgttcttgagttaattttttctctagccggtatttttgtattcgctgtcctataccctttaacatattatttttttcatcttccatatttgctacctctaaattatttataatatctttgaataatattatataaaataactcactcaagaagaacggcgaagataacgaaaatcaacagtttaacgacgcatacggcgaatctacaatattttattagcccatacttgggatataactaattataatattacttttatggtgaaaataattcaaaatttatattttttgattgaaacaatagtatcttttactaaagatagttggttttgactcataccttctacatcaccttttatattttccaaaaaaatgtttatattattagcagataaatcttcaacaaaaacatctatagaaacgtctaatgcttttgcgatttttaccattatatcaaaattaggtatatgtatacctctttctactcttgatatatggttttccgatattcctgttatgtctgaaagctgacgttgagttagccccgccgcttttctacatttctgtattctactacctacattttttaaattattttcatcttcattgtctagtatttcaactttattcataataaatacctcatactttaacatttatgtatattatatataaataataatacaaatggaacgacgcaaacacctacttttaattaaaagtaggtgtttttgatgagttttctctttatttttaaccgtacatgtggtataataagatttattattacttatacagcgataaaaattatatattgacaaggtttaataaatgaaaaaaatcctatctctattcttaatatttataatagtatttagtttctccgcttgtggtacgataacgcaaactgacgtaataactaatcctgctacagataccacgtacgcaacagttatgccggaaataaatgaatcagtaatgattccggaaaattctacctttgcagttcatttcatagatgtaggacaaggtgacgcagcattagtattatgcgacggaaaatcaatgctgattgacggcggtaaaccaaaatccagtgatgtaatatatacctatctcaaaaatcaaggaattaactgtttggactatattatctgcacccaccctgacgaggaccacataggcggactttctgctccgctttccacaatcacagtcaataacgtgtatgcacccaatattgaagctgatacaaaatcatatcaaagtttcaagcaaaaaacagaggagcagggcttaatcataaaacaccctgtctgcggcgagagctttcagtttggcagaagcaccgttaattttttcggcccggtcacagaatcggaagatgataaaaataacagctctattgttatgaaaattatatacggtgaaacatcatttttatttaccggagacgcggagcgcgaggaagaacagcagattttagacaaaggctatgatttatccgcgacggtgcttaaagtaggacatcacggcagtcgtaactctactacctatccgtttctgcgtgagataatgccggaatatgcgattatttctgtcgtcaaagacaatacctacggacaccctacggaggacgtgttgagccggcttggggacgccggagcaaaagtttacaggacggatattcaaggagatataattgctgtaagcgacggtcataccgtaactataacaccaaccaaaaatgcggacgctgatacactatcagcgcaaagagatgttacaacgccaaagccaaaagcttcggcaaatgctgtcggttacatcggcaacagtaaaactaaaaaatttcatctgccgtcatgtaaaactctcccggcagaacataacagaatgtattttgatacccgtgacaatgcaatacaagcagggtataccccttgcggcaactgtcacccataattttaaatttggaggtttatatatgctttattggattagttttattattttatttgttagctcattagctgtcttattctgccttttacatatgttgaaaaataaaagaaaacatgattatatggaaaaagagacttttgtagtgtttataattattttttgcgttatactgtttttcttgatttatatgagtacagatatacccagcgcattaagcggcggtcaggatttatatgtaaatgaattgccgacacgcattgtccttggtccacatgtttcatatgtcgatacggacaataaagaactgaaacatctaaacggctgtgactggaatgcttacgaaaaatacgggaattatcatattcggtacactaaacatactaagtttgtacttgatatagaaaaactcgattaaaaataaaaaggacaataatttatgaaagtatcaatttaaatgggaaaaaagatagtataaatacttgatttattagatattccggtaactataattctaagagatagtttgctgagccagtcccagttgcgctcgccggacccgagcgcgtaaactatttttatgtaataataaaatttttgtatatgtggtcatatacatagttaattttaataagtaaattgtatattgaacactgcgtgttcagatggtagctcacctaacgaggcggctatgccgccctaccgatgttcactgaaaccctgttttttttgtgttaaattaaattgaaccccaccttttttgataagtaaatgaataaagaactcgaaatatctttattcacggcagcacacaaagtcaacgggaaagtaacaaggctttttcttttgtgcgtggagcgcaaaagaaattagcgggggcgagcgccccttggagccgcaggcgacctaagcgaacaagcactttttcttttatttgagtattcatattattgacattgtaggttattcaaaacaagtaaccttgtattacacacaccttgcaggtgtggtcacaggtgaagcgtttctttttcttgccagaaaaagaaatggttcaaacaccttattatgtaataataaatttttttatatggggtcatatacatagtatatagatagtttttttatatattgaacactgcgtgttcagatggcagttcacctaacgaggcggctatgccgccctaccgaagttcactgaaaaaaccgcttttttagtgtaataataaatgattcaaacacctcattatgtaataataatatatattatatggggtcatatacaaagtacataaatggtcttattaaataatataacaatttttaaaaaagttaacgtataggcttggtcacaatcttagtcctcgttcgaaattacagattttattcttatatacttaaaaactttaaaagtcaagcagtaatatcctttaaattattacaagtatctcacattaaaaggtgctaaatattactaacaaactttttctcttattcctcttccttattatataaaaaaactattgactttataattgttatattctataatagttaaacgcttaactattaagcggtttaaacaagcttattatactaaagtatgtggctgaaagccaaatcaagctaaagtcaggaggtgaaatttatgattgattaccgtgaagttaatgggcgtatcgacaaatttcagattttaaaaagaagcaccctttttagtctgtttgaggacaacaaactgcatatccgtcagctcccggtgcttgaatacataatcaaaaacgacggatgcagtcagaacgaactcgctgaatttttgtgcgtttctcctgccagcatcgctgtttctaccaaacgtatgcaaaaagccggatatttagaaaaaaaggaagatgaaaacaacctcaggaaaaagaacctttatgtgactgaattaggaaaagaaacagttgcaaaatgcagaaaaatatttgactcatttgatgaaaaagtgtattcgggaatttcagatgatgacctgaatactttttgtaatgttattgacagaatgacaataaatataactggtgagagtcaaaacaatattgaccctgaggaactccttcgccttaaaccaagacaccaccactgcgaaaagttcaacgactgtatagatttttatgacaaggaggacaatgataaatgataaagaccctggtaaaacagatgtccaaaaaggatagaaaattttctataataactccatttttaattattggagaagtaactatggaaaccacaattcctatgcttatggcaactttggttgatgtcggaattcaaaattccgatataggctatgttgttaaaatgggattattaatggtgcttatggcaatgctttcactcgcgttcggagcaggagccgccagaaccgcttctgtcgcttcagcaggatttgcggcgaatataagaaaagcattattttataaaattcaggacttttctttcggaaacatagataagttcagcacctcatcattggttacaagaatgactactgatgttacaaacatacaaaactctactatgatgatacttcgaatgtgcgtcagagcccctgttatgtttataatggcgcttataatgtctatctccataaacgcaagactagcgtctatctttttagtcgctattcctataatcggaataatggttgttattgtctctaaattcgctatgccgaagttcagaataatgctcaaaaagatggaccaattaaaccgagttgttcaggaaaacttatccggaatacgtgttgtaaaggcttttgtccgcggagaatatgaagacggcaagtttgaaaccacaacgcgtgaagtaagagacacccaaaaagccgctgaaaaacttattgttgtgaatatgccgataatgcagcttgttgtatactgctgtatagtagctatactgtggttcggcggaaacatgataatggtcggcgatatgcagaccggtcagcttattagttttatttcatacgtaacccaaatacttatgtcgcttatgatgatttctatggcttttattatgcttgtaaactcaaaagccagcggcgacagaattgttgaaataatagacgaaaaaattgatattactgatgaaaaggctaatgataaaattctgctagaagacgggtcaattaaatttgaagatgttgcgttcagttaccacaatgatattatgaactgcgccgttcgtcacataaacttggatataaaatccggtgagacggttggtattataggcggaaccggttcttccaaaacatcactggtacagcttatcccccgtctttatgacgtaatccaaggcagggtgatagtcggggggcacgacgtccgcgaatataaactggaccatctgcgtgaagaggttgctatggttctgcaaaaaaatgttctgttcagcggaaccattattgaaaacttacgctggggcgacgaacatgcgtctgatgaagtaataaagcaggcctgtatagatgcttgtgcagatgacttcataatgtctctccctgacggctatgaaaccaatttgggtcaaggcggcgttaatgtttcgggcggacaaaaacagagactttgtatagcgagagctctgcttaaaaaaccgaaaattattattttggatgacagcaccagtgcggtagataccgctacagacgctcagatacgtgaaactttcagaaccaagctcaaggataccactactataattatagcccagcgtatcagttctatagaagacgccgataaaatagtggtaatggataacggccgcataaacgccgttggaactcacagcgagcttcttgaaaacaatgaaatctaccgtgaagtatatgaatctcagaagaaaggagctgaataatatgccgccgatgggaaaaggaaaacaaggcgtaataagaaagcctaaaaacacaaaaaagacagccaaacgtctgtttagctattttaaagaatacaagttcatgctatttatagttgtgctggcggttatagtttccagcggagccaacgttttgggcacatatcttctgaaaccggtaatcaacgactatatagttccgtttattggaagtcagaacccagacttatcaggtttcatacaagtgatagtattcatgctggttatttatgttatcggagctctttcatcatgggtttataacaggattatggtaagcgtgtcgtgcggtgtgctgtataaggtaagaaaccaaatgtttgaacatatgcaaaggcttcctatcaaatattttgatactcactcgcacggagacgtaatgagccgctatacaaacgataccgactctctcaggatgatgatgtctcaaagcgtgccccagctgatatcgtctcttttaacagtcatatccgtctttattatgatgattattctaagtcctatgcttaccctgctggttgttggtatgctggttattatgctgatagttataaaatttatcggcaagcgttcagcccacttctttaaaagacagcagatatcgctcggagcagtaaacggatatgttgaagaaatgattgaagggcaaaaagttgtaaaggtattctgctatgaggacaaatcaaaacaaaaatttaccggcttaaacggttcacttgaacacgccgcctccaacgctaacacctttgccaacatactaatgcctataatgggaaacctctcatatattcactacgcgctcacagctatgataggcgcatatttgactataataagcggaaacagcgacgccggatttttggcgctcagtattggttcactagcagcctttctgcagtatacccgctcattctcacagcctatcacacaagtatcccagcaaatcaactccatacttaacgctatggctggagcggaaagaatttttgaacttcttgatgaaaacgttgaggttgacaacggaaaaacaacagttgtcagagccgaaattgacgacaatggaaatataaccgaagttaaccacagaaccggcagatgggcttggaaacaggttcactcaaacggtcagatttcatacacagaagttcgcggagcagtcgaatttgaaaacgtaacattcagttacgacggtaaaaagaccgttctaaacgatatttctctttatgccaaaccgggacaaaaaattgcgttcgtaggctctaccggagcaggaaagactactatcacaaatcttattaaccgattttatgacgttcctgacggaaaaatcagatttgataagattaatataaataaaattaataaagatgacctgcgccgggcgctgggaattgttcttcaggatacacatctgtttacaggcaccgtaatggacaatataagatacggtaacctcgaagcgagcgatgaagatgttataaaagccgcaaaaatagcaaatgcacactggtttattacgcatcttcctgatggatacaacaccatgctgaccgccgacggtgataatctcagccagggacagagacagcttctggcgattgccagagcagccgttgcagaccctccggtactgatactcgacgaggcaaccagctccatagataccagaacagaatctcatattgagaaaggtatggacgccctgatgaaaggcagaacggtattcgtaatagcacacaggctttcaacagtaaggaatgcagacgcgataatggtgcttgaaaacggtgagataatcgaaagaggaaatcatcaggatttgatagagaaaaagggcagatattatcagctgtatacaggagcctttgaattggaataaattaatttttaggaatacaacagacgggtggattataaatccacccgtaatgttttttataacgcctttatacaatatagtattctttcacaatacataatctaattgttttagaaattaataaaactaaaccgtaaagcttacaataaactagacagaaaaattaaggttgtttttaaagaccaacaatataatgtactagcatttctcgttagattagctgtcatataacgttttctgattgatatttcatacctgctaaaattcactgaaaaacaaccttaatttttctgtctaattttctgttgactttttaatacttccaatacattataaaacacatttatattaattctgcaaaacaattgcaatgttataacttcacaataaatctattaaaaactcaaattacttaattggctctggtatatttagttatattgctcctaaaatctctcggcgacatgccatagatatcatgaaataccctgttgaatgtacttacactttgaaatcctgagttttctgccaccgtaatgattttatcatctgtcatacgcagaagatttgctgcatattcagcgcggactattcctaaatattttctaaaattcatctttatcttctttgaaaacactctcgacacataggtctcagccacacataattcgtttgctatggattccaaggttataggctcagtaaaatgctcctcaatatacttcataattttaaagcttatatcctcaatcggtgcatgtatttcctgcgaaagatttaccgattctaaaattctgctcagaattattaccgtccaggcaatctgaagattttttgacagactgctagaaatactctcaaacgcatatttagcgtccggagataattcttcctttgctataatcggatttaatggaaaactgtcagtcatatcaggaaaaaatctgccgtaaaactttttggaacatattatcagcatctcatcaacaccggaaactgaaatattttccttataatactcatgtacaatatttgggaatataacggctgtctcaccctgcttaagcaaataagattttccgtcaatcctcaaatgctgagaaccttttctcatgtgcaatatttctatatccatatgtatatgagggctgtatgccacttcatataggttatttttcacagaaaattcactttttctaacttcatagaattgattcatgacttttcacctctatattatagagtatatcacatttgtaataaagtttcaacaactcagttcaatttttgggcagtttcagtctataaataaatagattattactgtctgtctgatataattaagctgatagttaaataaattaaggagatgaacagttatgaaaggattgtttaaacggcttatgggggtatttgttatagtttctcttgtatgcagcacttttgcagtgccgatagaagtaaacgcggtttccgatacacaacaagtcgatggaacaacaggaactccgctcggaggattcggaaccggcggagtaaaatttaacgcaaggctcggttcttttgccgcactgacaaaggcaccggctgacgcaaacgattacaccgcattaaaagacgctaaatttcagctttacacaaacagaaacggctcaataaaaacggttgatacaatgaaatcagcttcaagcaacggccgttcagaagatgacgcaatatggcctatgcacttcgcaaatatgggttcaacaaatgatgttcaagttaatttaaaggcgttttcacctttggacaatgtggactatgacaatatgagtatgccgtatgcgttctatgaaatgacgctcgagaaccttggtgatacaagcgttgacgcttcatgcgcattccagctcactacaaacgacataccagcccttgttgacggaaaaggttttaacggcaaaaaatgggctatatatggaaactctgaacaaaacggagcaatagtatcagttggaaacaattctgattttaacaccaccggcgtgcttgacaattctatcagcggaaagaccaataaggttgctgttaaagtaaatcttgacgctaaacagagcaccgtaatcagatttgttctcgcatggtatgacgattcagaacctgactggcattattatctgaatctttacaataatccgggagatatagcagcaagaggtttagagaagtttgacactttaaaaaacaatgctgaaattcttgttaccaaaatgagagactccaatctacctgattggtttagaaatcaaattcaaaacactcttgtaaacatatcaaacaactcgatgtataaaaaagatggcagagttgcatattccgaaggacaatggacctgtttcggaacaatggatcaaatgtggcaggcaaggcaggttattgctcagtttataccattctttgcttggcgtgaactggaatattgggcaagaacccaaagaaacgatggacagatacatcacgatttcaacacagcggtagaaaacaaagctgaccgcgccgagcttgttgactgggattatactgagcatcccgactatagaaacgttgataaatgggtagaccttaactgcggtcttattatttcagtttatgaaacaatgcaggttgcaggcaatccatcaacagacggcataatcttaggaaaagacccaattccggaaggaaccactatgctggattacttctggccctatctaaaaaaagccggagacagaattttaaaacaggttgaactctacggaaataaaacatatccgtatacatttgacaattctgaaaactcgtatgacgcaggcggaaatccaaacccgtataatgcaagtgtttcagcggtggcttataaaataatggcacgtttggctgatgagatgggtgaaactgaagaagctgcgaaatatactacagcatataataccgttactgattcttttgcaaaacgttatctttcaaacaacttcccggaagacaaacgtgtcagcgaatcattcttaacaggacaatggctctcacttcacttaaaattaggtcaaatctggacagatgaacaaacagactatgcactttcagaactcgacagtttctatcatccatactattggggtatgggaactttaaaaggtacctacaacgaatggacgccgtacactcttatgcactatggcggactgcttctgcaaacaagaagagaaaacatttttgaagcaatgcagcgtgattcatacaacagacagtatacagacagaaacaaggtattcaatcatccgcttgatattctgccggcagtaaacacaccgaactatgctgcaacaactatatccggtgataaacaatatatcagcatgccgggactatggagaaattataatgacgtagtcggatattacagagaccagcgcacaaaggatatttgggttcagcccagacttcttccggaaatgaacaacgtaatgacagacggaatgtttgtaatgcctgaaggatacggaacagtcagctgtgttgaaagcggcgaagcaaatcaaaatcagaatatgactgtgaaatcggataatccaattgctgtcaaaaacattcacctttctgacaacttcggcgaaaccaatccagtcgttcagataaacggtcagcctgttaacttcaccagaaccggaaccggatatgataaggaacttgttgttgaatggaacggaactctcgacagcacaggcattactatcgagacaagcggcgaagcaggatatactgttccggcacttcccgaaaaacctgaccatggtccggatgacaaaccatctggcgaagtaaaaaatccgtatgaatctatttcagctaccagtgctgaaggaaaagttaaggttgatgtggaaaccccaatgggacaggattggtttgttagaaatcaattcaactatgactcacatatcatttttgaaaatgttgatttcggagatgtgggttcaaatatgatttcagcaagagttgcaagtgtcgattcaggattcactctccaggttaagctggacgcggtcagcaacgacataataggaacaatagaggtacctaacacaggtaacgaacagacctggaaagaagcctcatgtacattgaatgaaacagttaaaggaaaacatgatgttattatagtttttgatgctgccggagcaagcggcgaggacgcaaagtttgtaaaccttaacagtataaaattcctgcaagcggacggcagacttgacagaagtgcatggaaaggctcggcttcaaacaattcttccagcacatttgcagcatgggacggagacttagaaacaaaatggcactgcagctggcaggaaatcggcaaatacatgactattaattttggtaaaactgaaaagtttaacaagatagttattgacaataacaccaagactactgatcatcctaaaggatacgcactatatgtatcaaatgacggcaaaaactttggagaccctattgttaccggaaatccggaacaggacacaaaactcgtaatcgagttccccgaacagcaggctcagtatattaagatagtaataactgaagctaactcttcaaaatattgggctgtaaacgagcttaacgtgtttatggaaaaagagcctgaaccggaagagacagacccagcacaagtaggagtattttcaggaacctcctctaaccacccaaccggaacaaaatatttcaatataacaaaaaatgatttaggttcaaagcctgcaagagttaattctaacactgaaagagccaaatttgttgacggaatcgacgctaaagtaaaagcaatatttgcagataaaactgatgaaacgttgctgagagaaaaattcactcaaactttcgtcaactatattggtaaaagcggagattatgatgtcaaaccaactattgcagacatttcactcccggccggcaagtattcaatctattacttcggaggtgaagatttgcctgtaatcgttgacctgcctgacgcggctccgggtatggttacagttgacgcctcaaagccttcatacgcttttgcaactattggaaccaagacccataacatgaaagaaatttctctaacagtcaatcaggactacaccggagatattacattctataacgagaacggatggctcccggacctttattctttggtaattatgaatgacaacgctcctcagcctcagcctgtaacagaaataacaggatattcaaaagataccggagttgtttctatcagcagaggagaagatttcccggagaatgctgtcgtagttgcggcgggatatacaaatgatgtattaactgatgtaaaatacgcagctgtaggatcaagcaacgaaattgaagttggaacagttgccggagacacagttaaagtttatctttgggattctcttgaaaatatgaacccgctttgtgaagcatattaaaaacaaatttatggagcagcatttttgctgctccataattattatataaactaaaataaaaataatattttataattacaaacccattttcttaaataccttccgctattacagcgcggctgtccacattatttttgcgcttggatactatcatgttatactcatcggaagcaaaacaagcttccaaattactcttatcttcaaaacgcactactataacgcgctgtggatttctctcaccggaaagagtttgaagattttcagtccgaactaaatattttccgccatagctttcaacaatcggttttacagcattaatatattcatcatactccccacgtcctttttcttcgttaatatatgtatctacaataaaataccatgccataacataacctccaaataataatttttgttagaatagcaataagtctgtgaatttcaattcatctataaatatcaaacacgggtttaacctaaaaataaatactaaattttaactcgaaatactttctgcataaatcaaaaacttttttctttcacttataattatcattcccctaaaaaacggaaagattatacccaaactaaaagtataaataaaacaagcataccaaaattggtatgcttttaaatctatttcatatgctgtcttgaaacctttaaccttgacagcgcgcggttaagcgccgcctgagtttgataatattcccgaatactctgtttctgtctcattctctcttcagcgcgttcttttgcttccttggcacgttttatgtcaatttcttcgggtctttctacggtatccgcgagcaaggttacatacgtcggcatgatttctactatccctttgcttacagcggcataataccactttccgtcaaccttatatttaagctcgccttcgctggtgcaggttacggttgcctcatgatgtggcaggactccttggaggccgtcaagagcaggaaatatcagcatctcgcatggaccgctgtaaaacgaacggtcgctggcaagaatatcaagtttaaaagttttttcatcagacatgtgaatcctcctcacaagttaaaaaaagttataatcttaattaacctttaaaattctttacatcatcaattgtccctgccatcataaaggcgttttcaggatagtcgtccatctcgccgtttataatcgccttaaagcctttgattgtctcgctcaaaggcacatatttgcctttaaatcctgagaacacttccgctaccgaaaacggctgtgacaagaacttttgtatcttccttgccctaaataccgtgactttatcattttcatccagttcttccatacccagtatagctataatatcctgaagttctttatatttttgaagaatctcctgggtctttctcgcaaccatataatgctcttcgccaactatagaaggttccaaaattctggatgtggactcaagagggtcgacagccggataaataccctgctcaacaatttttcttgaaagcactgttgttgcgtccaaatgcgcaaatgtattagccggagccggatctgtcaagtcatcggcaggaacataaacagcctggactgaagttattgaaccgtcctttgttgatgttatcctttcctgaagttcgcccagttcattggcaagcgtaggctgataaccaacggcgctcggcatacgtcccagcaatgctgaaacctccgaacctgcctgaacaaatctgaaaatattatcaataaacaacaaaacattctgctttttaacatccctgaaatattcggctatagtaagaccggtttgggcaactctcatacgcgaaccgggcggttcgttcatctgtccgaacaccaaagcggttttatcaattacccctgattccttcatctcatgccataggtcgtttccttcgcgggaacgctctccaaccccggtaaatattgagtatccgccctgctctgtcgctatattatgtatcaattcctgaataagaactgtttttccaactcctgctcctccgaacagtccaatctttccgccttttgcatatggagcaagcaagtcaataactttaattccagtctccaatatctcaacaaccgggctttggttttcaaaactcggagccgcgcggtgaatactccactgctcttccccctgaaccggctctccgccgtctatggtctcacctaaaacgttaaacatacgtcccagcgtctgttctccaacaggaactgtaataggtttgccctcagacacaacctccataccttttttaaggccttcactggcggcaagcataatgcatctaaccacattattgcccctgtcctgagccacttccataacacaggttttatcattattttggactgtcagtgcgtccctgatattgggaagctgatcggtgctctcaaaagccacgtcaactaccggtccggctaccgaaacaatttttcctatattcataactgctcttacctcctatttcccatctcatactgtcatagagttataccgcgctcattttttatgctgacttttcgcaccgctgacaatctctgttatctcctgagttattgcggcctgtctcgccctgttatacgcaaggttaagttcctgaatcatatccttagcgctctttgtcgcggagtccattgccatcattctggcatgctgctcgctcgcaaacgcttccaccattgttccatatattaatcccttggcataattcgggacaaggttttccataactatttcaggagacgggtcaaatgtggcagtatggtgaatctcacgatgtttgccgctgtgcagattttcaaatctctcacgcctgaacggcagtatttgaagcagttttgcttcctctttcatagacgatatcatatctgtatacactacataaacatcgtccagctcctctgacagaaacttactcagtatcaactcagaaatttctctcgccctgtacatactgggattctgagcggtgtattgaaaatacgcttcatacggtatgccctttctggcaaaatacattctgccgacctgacctattataaagagcttaatttctccgcccttagcaatctcctgctcggtcagtttaagcacgttatgattataggctcctgccaaccccttatctcctgttatcacgatataaccttttttacgtttttcatttggtatctcatcgcggcggtgaaaatataaattgcttgtatgcggggtatgcttcaaaatatgagcaatagtattctgcaaagtataaaaatatggttcggtatcgtcaagtctttgcttagcgtgcttcatctttgatgaagatataagatacattgcgttggttatcttcattatatcattaacgctttttattctcgaacgtatttcacgcatattagccattatctcacccgctctcagtcttccttactattgttttcgtttaacacaacttccgcttcttctcccgggtcatcagccaatgctgatacatatcttccggtcttgaattccttgcacagctctatgattttttcttcgtcttcatcactcagcgccttagtttcgattattgtttttattattccaggagctttccgctcaacaaaatctataaagtctgacttaaagtttactatttcatttatcggtatatcaagcagcattctatttttgctcactgtgagcaaaagcacctgtgcataaagcggcaaaggattcagcaaaggctgttttaaaagctccattattctgtctccggtgtcaagcagctctttggtcgccgggtccaaatccgaactaaactgactgaacacttccatttcacgatactgcgccaaatcaatacgcagatttccggcaacttttttcattgctttggtttgcgctgctccgcctacacgagacactgaaagccccacgtttacagccggtcttatacctgcaaaaaacagctcgttttccagaaaaatctgaccgtctgttatagaaataacattcgtaggtatatacgccgaaacatctcctgcctgggtttctataataggcaatgcagtgatagaaccgccgccgtgagcctcgtcaagacggctggaacgctcaagcagacgagaatgcagatagaacacatcgcccggatacgcttctctgcccggcggtctctccagcagcaaagacatcgccctgtatgcaaccgcatgcttagacaaatcatcatatacaatcaatacgtcttttccgttgtgcataaaatattcggccatagcggttcccgaatatggggctatatattgaagcggcgccatatcgctggcggacgctgaaacaactatagtataatccatggctcccatattcttgaagtcgctgacaagttttgcaaccgtagaagctttctgtccaacagccacatagatacatataacgtctttgcctttttgattaattattgtatcagtcgctattgaggtttttccagtctgtctgtccccgattataagctcacgctgtcccctgccgataggaaacatgctgtctatcgcaagtattccggtttccagcggaaccgttacaggctgtctttcaataactccaggcgccgggctttcaattggatagaaatcgtcttgctttatctcaccctgtccgtctatcgggtttcctatagcgtcaacaaccctgccgattaaattatttcccacaggaactccggcgcgtcttcctgaacatctaacctttgagccctcatgaagtccatggtcgcttcccaaaagcacacagctgacagtctgttcctccagcccctgaaccatgccttttactccggtctcaaatataaccaactcgccgtacatagcgttgcttaagccatacactgtcacaatgccgtcgcccatgctgataatactgccctcgtcaacagccgtcatttttacgtcaaaatcagatatttcttctttcagcactgaaataacatcacttgtgttaatactgctcaaatctatcacctccgcaaaagtgttctgcgcattctgtctaaagctcccaaaacacttttatcatataccttatcatttacataaagtctgaaaccgcctattaaatctctattttcaaccaagcttaactcaacagactttacgccatattttttaacaagcattgccttaatactggataccgatttttcactaaccggctctgcatattcaagagaagcttcaagcactgaattgtgcctgttccaaacctgcttataactctcctctatcaaagataaaacgctgtaatcaccgtttttacatactgttttcataaactttccaaagccgccgtcaaaaattctgtctataaccgcatatttctcttttaagcttattgttggattagccaatgcttgtctgagctcatccacagcaagcagtgcggtgaactccataacattttttatgtcactactgatttgataaagcgcctcagcataatttaaagcctctttggttattatctttgctctgctcattttgcttcacctacctcaagtataaagctgtcaacagcgctctcagaaacatcaccgttcttcgccgccttcagcgccgcgtccataacgagcgaggctatctcagacttagcttcagatattgagcgttctttttccagctcaatctgtttgttagcgtttaaaacaatatttccggcgtcttccttggctttgcttattatctcatcacgttttgctttggcttcctctttggcggactttattatatctccggcagccgcctcagcagttttaagcttatcggtgtaagccgcttttaaagcggcggcttcctgtttcgccgcagaagcgttgtcaagagacgattttatctcgccctcgcgcttctccatcattgcggttatcggaccaaaaagaaactttctaagtaaaatatacaatatgataagatttacaaaggtccagattatattccaatttaagttaagcattcaaaccgacctccgtcatccaaataataaaaatacctctcctatttcaagaacaggattatcatgattgcgataacgaatccaaaaatagcggttgcttccgcaagagcacatcccaaaagcagagccgtattgatgtcgcctttggcttcaggctgtcttgcaatagcttctgtcgcctttgaagttgctattcctataccaatacctgctcctatacctgtgagtgccgctatacctgcaccgattgctattaatgctcccataaatatacatctcctttaaaatttctgataaatttatatgtagtttaatcaattttctaatttaagactattccgtttcggttacttcctgaatataaagcgatgtcaggaaaacaaaaacatatgcctgcaataatccgtcaaatatatcaaaataaaaactgaatgcaagcggaacaaaaacaggaacaaccatttttataagctccataataacaaatgagcccaaaacgtttccaaaaagccgcatacaaagtgaaagcggttttattacgatttccaaaacattaagcggcgtcataaaagccatcggctgggcaaaaccctttatccagcctccggcgcctttcgcctttatcccggcagcctccaccaaaacaatactcattatggcaagccccgcggtaacatttaaatcctttgtcggcggcgtaagcccaaaaagaccaactatattagaacatccgatatataacaagacagttcccaaataagggatatacctctttcctccctcgcctaaaatcccggtaaagaagttatttatccagccgataaacgtttccaaatatacctgcactccgcttggcgcaagtttcaggtttcggacaaatatgatagaaaacaagacaagaacagccattatcccccaggttataaccacggattccggcaccggaatccctccgaaaatcggaattgtaaaagcaatggttgtttcattcagctttgtataaagttccgctgcaatatcattcacagtctgtcaccgccttgttaaaaatttctcaaactcaaagggtaaaataaaaaagaaatacaccagatgcctctttgcatgctgatattaatttcttttttatcttaaattacttttcaaattatctctcatatattaacaattcaaaagtcatcactaaaaaagtcaaattttataaagcaacagcttgtttgaaaacaaacaaaactgttcgaattcaaactctttacttgaagatagtatattcccatttttttgaattgtcaatcttaaaattaacaaatatgtatatagaatacaaaagaaaattgtcacaaattcctttaaggaattattttatatcgcattgatatgattttattattttatcaaaacagccagttccggaacgttctttttgatttcctcagtaacccaaaaggctattttgtccgctccgaagatattcaggtgagtatcatcatcatcgccgttttcgtagaactgtgaatttaagaactcagggttatacataaacctctcatcatgaggctttatgattttatataagctctttgcttcctcaagaccgacctcgtttatccagtcatttgtcctcttatagacatccagcaccggaatattcaactcttttcccagttctttagcggcattgacgtattcttcaaggctctcgtctgaaagcttccgtctgctcactgaggttgccaatatcggaattgctccggcatctctcgcaatatttatatatacgctcatataatttttatatgagcctttttcatcaattttaccaaacgccggagcatatcttgacggatcctgtattttagaatcattatgaccaaactgtaatatcagaaaatcgccctcgctgatattatccttaaagaccttaaaattatcttcttctgtgtaactctttgcgctcctgccgctcatggctatatccgcaaccacggctttatcgcttataaaatacttatcaaaatactgagcccagccagtttggggaaacctgttgttttctccgctgtgtggatatatgcttgcagtggagtcgccaataacaaaaatgacccgtcttccccttctgtcgattatattagagtttttctcctgcctttttccgctgcctttcagaacgttaagcacaaaactcttgtcaatgtttatttcaggataatcctgatacgaaaaatgagccgttatagtcacattcttctcctcgggcaggcaaattacctcgcccgatgtggatacagaatccgggtctgaacttgaccacgaaacatcggcataaccaaatttagtatttctgccatcccacaggttaaggtcgctgcaaaccctctcctcacactcattctcaagcttgacctcggcaaaatcaatgttttcaatctctgtcaataacgctttgtattcctcattactatactttttcacatctttcacctctaaaaattttttcagtgttacactctatgattaacattatatatcaaatattttatttactcaagtcataacttaaatctattaaattatacagctcatctattgaaacagaaccgtccagcaaaaccgtaatccaatgttctttattcatatgataagccggaaaataacctttttctttaattaaagagcctattaaaacagggtcgcattttacgtttataatattcacaatttcagagttattcagccctaaactggttttcgccactgtcattaacaaagcgaaccactttgcattgtccttatgccttaaaacagcgctttcaggtgatttaacccacggatagtcaggctccgcgtcatatttttgtttagcatacttaaaaatatcctgcttgtatctttcagcagtatcttcgcttcctcttatcattttactccccttcttctgataaagactgataacttccgtaaaattcaggtatataacacaaatcggacgagccttcttcctgaacatagacattttccattcccagggacgcgcagtaatctaccaaagtttcataatatcctttcggcaagttcctgttaagctcatccatacctctcactccgggcataatggtatactggctcatcaggcttagccaaattttgtcttcatatttttcaaacaaatagtcaactatttttttagcctcaaaaatcagaccgggcaataacatatgacgtactatgacacctttttttataagaccgctgttgtcaaattcccacttgcccacctgcctgtacatctccgaaacagcttcggaagccgttttaaaataatcttttgcgccggaataacgtttggcgtatttgtctgagtaatatttcatatcaggcagatagacgtctacatacccatcaagaagtttcagtgtttcagctttctcataaccgccgcagttatatacaacaggcagattcagaccgcgttttttcgcattgtccagagcggaaaccagttggggaatataatgggtcggagtgaccaaattgatattgttggctcccttatcctgaagctccaaaaaacaatcggcaagttcttcatccgtcttttcaagcccttttccttttgagcttacatcataattctgacaatacacacatcttaacgtgcagtttgaaaagaataccgcaccggaaccgttttcacccgatatacacggctcctcccaaaaatgcaaatcagccctggcgattctggctttgtctcccgcgccgcaaaaacctgtttcgccgctgagcctatccacaccgcactctctcggacacagcctgcattcgctcaaaattttatataaatccatttgtacacatctccaaaataccgccgctaaagcacgctgagcgcatatctgaacccctgactttctacagaggccggataatttatgattaccaaatcatcaaactctgtatagcggtaaaactcgtctattttaaactctcctccgccgaaaccatataagccgttaacatgccgcgggtcgattatataaacaacgctgtagttattaagcgcccaggcagaaaacgcgttgccgtacgagtccttaataatacaaatttttctgccgttatcaacattcgttttaaatacggtgaccggattgtctccgccaataaatgcagaataagagtttatattctggtctaccggcacaacgttcatcaaataatcacgcatatgtccgtcacgatacaccgtcccctcggcgtttactttaggcataaaacgctccagcgtttcaaagttgcctgaaattttcgccagctttcccttttcatcatctaactctgtcaaatacttctgccaatatccaataaaataatcaaacttcatattctgaaaactattaatatcgtcagccatttcatttttgcattccaaaaacgacttataggcgtagtacgcccctctttgcgtccaatggttatccgtcataaaatacagcttttctccgccatgctcaaataaagctgtaacagcgtctataggtgtgacccagcttttcaagctgtcataaaccatagacagcccctcaatttggctcctataaatttctttcggcgcataaaactcgctcatagacggcacaagcaacgaatacgtgtcagcaagcggaaccttttcagctatgtgatttattatttccgcatattcttttgcatttttctcggaaatacttatatcctcaaaaccaacgttgcctacaacatgcagtcccggaaaactttccacatcattatacgccatgcggtatcgtccgtcaatccaaacaccgccggacttcagcggattaacagccggtctgttattaaactgcgttctctcttccaacgcagtctccccaaaattcaataagatttttgccgcgcttgaagtttgactgccgtcggtaacacgaacaattttataagcgtcaaagtattccaccttgaaaccgaaactctcggcaaagaatcttagcggcagcattaatttttcatcgtttatatagcagtttacagcgtctttgaccgctgttccgttcacgtaaacaggtgttgctgctcccggaaggattgttattattatatcccccttactgagggttgcgccgaacactgtttcgtcccaaaagatttccgcccccacgctctccgccaactcacggacaggaatataagtaacgccgccgagtatttctgcaggagcggcaagcctgtcatcgtttacgactatcataacatagtcggtttttaccgcataagcggagaaggacatacaaagcgaaataaacactattattaatacgccaaaacagaatttatttttcatataatcaccgatataacaattttacaaattatgattaaattcacacaataactttatcacaccggtcataaaaagtcaacgcactatcatattaactaaacggattttagcgatgggatttattctttttgcgcggttattaagatattgagtccgtcgttttccataataaaatcgcagctgtttgacttctatataactttctgaaaatttatcagtttatctaaatataagtacaaaaaacttgttaaaattaatttaaacaattccggttaagcaatttttaaatcttgacaatttacatcgataagagagtatattaattaataatagaaatatttctgaatatctacacaactaagaaatttaatatttatctataaaatatttttaacagacatgtttactaatgactttatagtaaatggggtagtttcgcttagttttgcgagaccttttacattactgactgctatattaaaattatgtgatggatttttcatattagaggaagtataaatttttaaatcatttgttctaattaattctgctatacaaaaatttaaaatatcagaaacagaagcatcgtaagttaaagaagcttcttctaaaaagttatataaatcatcctcaatttcataagttttacgtattcttttttctcttttagagaatttgttatttaaaaatttattattcatcattcgttatagcccttttatgacctaatattacaataatttataagatgtcttttttcatccttaccgtattatataatatgttgtgatataagtcagaacaaactagataatttatatctaaagcagataaagtaataaaaattttttataaatattcaatttaatttaactattccaggcaaaactcacttaatattgagttcttactcctaccaaaggtgttaaacgtttcaatagaatggttataaagtaattgattgtttattactctcttatttttacaataacatatttattactataacattcactaatttggtgggtttagcaagcctcggcagggaggacaaagtcctcctcgtgaggtgcgcagccgcggtgatacttcataattataaataccattttatataaatccatttaattattctataattgcttactttgatgcgccagaccctgtttcgcccgccgagcccgggcgagatcgtcatccccttcagagacgattaagtcaaaccaataatacctatataataaaaattatattaaaagaacttgttatttagcaagcatcggaagggaggactttgtcctcctcgttaggtgcgcagccgcggtgatacttcataattataaatatcattttatataaatccatttaattattttataattgcttactttgatgcgccagaccctgtttcgcccgccgagcccgggcgagatcgtcttccccttcagagacgattaagtcaaacctatataataacatttataacaaaaaatgacgctatagcagttttagctgctataagcgtcattttaaaatatattaaaatattatcccgattatctgtatgagtatccgccttttatcattactataacatcattactggctgtgaaacctctgccgtcattcaccggaacaatcagcatatgattcgacggcaactctgttccgtccggcaagtcataaccataagtcgtgtcggctattccgcccttctctgtcccgattaccacaccgtttccttttctcagaataaattctgccccagcgtcaaatataaccgtttgtcctgcatccacatttacaacagaaaacttctcagaatatgaatctgaagtcccgcctgacatcttctgctcaacgtatgctttaagctgcggcaccaccacatcaactatatagctctttgtaaccacagggtcgtctgtgtcccccggttcagccaataccagcgttgcgcccaaaactgagagaatcgccgcaaccgcaataatcatctttaaccacttatttttcatttccacgcctccttttcatatgtgtatataaccgccgttcattttttattaatcctccaaaccaaagctgatgcttatggcatggttaacacggttcatcagtccatcgtctagatgaccaattttctctttaagacgttttttatctatagtcctaatctgctcagccaaaacaaccgagtcctttgacagcccgtagccgcctgcgtccagttctatatgcgtgggcattttagctttattaagctgcgacgttatagccgttgcaataacggttggactatacttgtttccgacatcgttttgaataatcaaaacaggccgtactcctccctgctctgaacctacaacagggcttaaatcagcataatatatatctcctctttttactaccaaatcaattcacactccgcaagttaaattcccgtttatgtctttggtaatattttatgctgagagacctgtttttgttctgtgctgcaaccggacaacttgcggtaatgaacggttgttttatgtacaggtcaatctttgaaaggactgtccaaaaggtaattatgaacgtctgcgaccttgccgcccctcatatataccctcggaattctcttaccaatgacacaaaggatttcataatttattgtccccataatgctcgctatattctcaatgggtatttctgcgccctctgagctttttccgaacaatatgacctcatcaccgatatttatattattaacatctgtgacgtcaatcatacattggtccatacaaatatttccgacctgcctgcattttttgccttttactatcatttctgtcttatctgaaaggattcttgagtacccgtctgcatatccaataggcacagtagcgatttttgtttcattattttttgttttaaattttctgccgtagcttacagacgttcccttttcaaccgtcttaatattggttatctgagccttcagcgacatagccggttttaagtttaaaatatcttttgatacaaaatcactcggcataagcccataaagtattatacccggtctgaccatatccatgtgaaattccggaaacctcatcagcgccgcgctgttacagcaatgacacagcggaacttttacccccgcttcccttatcctgctgcacaaagtgttaaaccggttatactgcagcattgtatactcgtcgtcatcgtcatctgcaatggcaaaatgggtaaacaaaccgtctatttccaaatacggcagttttgaaatctctataatttcatcaaccgtctgcttatttattttttcatcctctgtgtatctgaatccaacacgccccataccggtgtcaattttaatatgtattttgccggccttattcagcttggctccggcgtttgacatcgcgactgccagctctttggtataacaattcggcattatatcgttttctattaactcctcggcatatttagacggagtatttcccaaaatcaaaatcggagtatcaataccgcacagccgaagctgaatagcttcatccaaaaaagccactcccagcgaatcagcgccgttttcaagaagcgtttttgcaacctcaagatagccgtgtccgtatccgtctgctttgacaactcccataattttaggcttatcaccaacatgtctgcgtatctcttttatattattttcaattgcgtcaaggtctatctcagcccacgcgcgcttttcagtaaccataattttctccttcaaaaaacatctttcaaattaaactgccgtgttcaccagcctaaaagcctccggtaacatttcaaccaaatcagttgctataagcccgtgctcgcccttgtcacgtcttgccaaatccccggccgctccatgcagaaacacgccgagaacagccgcgttgtaaccgttaagcccttgacccattaacgagccgataactcccgacagcacatctccggtacccccggtcgccattccggcgttacctgagttgttaatatgtacgccgccgtcactgttggcaataacagtgtcctttcctttcagaactaccgttacgccgaactcctcagcaaaatcacgagcgattccaactctgtcattctgaaccgcctcaatgctcaaaccgcacagccgcgccatttctccaggatgcggcgttatcacgacctggcacgattttctgtttttatgctttcgcaaaatatccatatctcgtgaaatacagttcaaaccgtccgcgtcaatgacaaagtctgtgcttccgctcagaagcgaatctataagtttaggaatatcatcattatccgaaagcccgggaccaaaaacacaaacgtcacttttattcagtcttcgcttgatttcgcccagagcgtcgagacttattgtgccgctctcctccacctccggcaaaggaaccgtcattgcctcagtgagcttaaccgccataatctgctgctgtgattcgggaactcccaaagtaaccaaaccgcttccgcttctaagcgctcccatgcaggacaaatatgcggctcctgtcataccgcggcttcctgcaataataaacaacttgccgcagtcgcccttgttagagtcttcattacgaaccggaataaggcttttataatattccagtccggtataaaacggaatccccattcccgggatatcctcagatatatataccaccgccaccgcggtcttatttgaatgcgagatgcttaatgcagcgttaaccttcattcctccgaatttaataaacggctttccaagctcatcgtggcagacctctatatctgacagcgaaaatcccctgacgccgcttcccaaagcctttgaaaaagcctccttagccgcaaagtggccggctatagattcataaaaacctttagccgcagacccttttgagacaaaataatccgcctcgttttgggtaaacacccgccttataaacatttcaagatttttcatttcacgaaaccgtgagatttctataatatctattccaatcatattattccgcacctttgacaagcataatttttagtccagcacaaccttctgcggattaaactttttaaaaccatcacggattttctcgttagggttaaataacagcatctttccgcttccgttttcattatacactgcaaaatacaattcactgctgtttttatcaacacaggcatataccttttgataagactggttattcatatatctctcaaaatcaggatgagaacgcttcgccattatctcaacctctctggcgttgaactcggtcaaacgttttctctttctgacattaactatagcgtccacatcaaacgagccgttggtaaaacaatactcatactctaaatttactgatgttatcagcatgtataagagataaatcagaccgcacgcaactataaaaattataaatcccataagcggtatagaaaacatcagcgcccctaaaacatatataactaaaagagccccgatgatacctgccaaaatgattaaataatccttgctgtcacgttttttctttaccaattgttccacaaaaatatccattaaattgcctcctgtttgtgtttcatattttatcagacgaatgttctgatgtcaagccgcctattcggcaataggtatgttctcagcgcctataccgctcacgccgctcagtttcagtttaccatccgcatcgtcaccgacagcatatattgttccgtcatagttaagtcccagggtatggctgtttccgcaagctactgacataacatttgcccaaagcgaaacagaaccctgattcttatcgttaacacccttagaactcgtctttccgtcagcgtttacatagacaatatactgagaaccgactgccgccgacactatatttttaactcctgaggtatcacactggcggtagctgttatcaccgacagccacaacagagccgtcatattttaccaatacagtatttttttctccggtcgctataaatgcaacatcgctttggcctgcaacgtcacactgtccatggctgttccagccgacagcaagcacagtgccgtcgtttttcagacctatcgtgtgattgcctgacactgcaatctgaactatatcagtccattcctgaacatcacactgaccatacttattgttacctctggcaataactctgccgttagctttaagcgccacagtgtgtccctcacctgtggcaactgacacaatatcagtccagcccgacacatcgcactgaccatactcgttgttaccgactgcaataagatttccatcgtatgtaagtccaacagtatggtttccgctgaccgaaactcctataataccggaccaatccttagtttcgcactgaccgtagctattatccccgaacgacaaaacctcgccgtttttctgaacaactgcgctgtggttgtatccggccccaatcaatctgccatacatattcaatatttttctgacgttaacaacactttgcttatattttccgcttttatgaaaatattttaaggctttctgatattcatgtatattcatataagccattgccgttgaataatcaatctcatgtttctctgtgccgaaatagacaaaatcctgttccagcttttcaagagtgggcgcggcgttctgaaaatcacggtttatataataattcattgccgttttatagcaaagctgacgcgccgaaaaatatttctgaactcccattccaacgaacgccaatatacagcatccaacaatgaccgaagaccaaattataagttttttgttggcagacattcgctttttcagttccgttttttctttggtatccttgatagctttggtcagtctcagcctcagccagtcctcgcccaaagcatcctcggttactatatcattatcaagtttttgctctgaatttatccaaatgcttccgtcgtcaaacaatatttttgaaacctcaacaaaaacagaacaggttatatccggaacctcaaccgtttgagaattaccaaacacagcgttgggttttgcgtcaacatttatatacggaatatttctaagctgtacacaaagattaagctccgaatcaaaacaacctgcattaaaatataccgacttcaccgtttttccgcagttattatatagtttaagcttcatgacggtctttttgctgtcgcgcagtatctcgcttgtatcaatatataccggagctttgccgcggttttcatattctgtacgttttaccactttatatgttttttccgccatataatcacctttatcaacaatctatttatattgaaacaaaataacataattatacttagacattatactacaaacttcagcaaaatgtattacaacactgttaactctgttatacaaatcaaaaacaggcgtgcaaaatatatcctcagtttccattatattattagactggaaatattgagtaaataaaaataatatgatataatgatacaaaaataactgtaaaggatgagagaccatgaatataacagaagcgataaaaaacagaagaacaatcagaaagtttgaacaaaagccggtcagtaaagacgacttaataaaacttatcgatttaaccagatacgcggcatatggagcgaacctccagccgcttaaattcgcggtaatggataatccggatgaaatatatccgctgacacgctgggcggcatatatgacggaatgggaaccggcgccgaacgagaggccgcttcactatatagccatactcggggacacaagcattaagaaaaattttgaaaccgacgccggaacggcaataaccacaatgatgctggcggctgaagaaatggggctggcaacctgcttgctcggggccatagacagggacaaaattaaagaaatgctcaaaactgactatcaggtattatatttgcttgccataggctatcccgctcaaaaaagcaaagttattgatattgaagacggcaacataaaatattttgaggacgaaaacggagttataaatgtgccgaaacgttctcttgacgaaattattgttaatatatagttaaggttttgagattaaaacagctttcaattcggaaagccgttttacgttagtttaattaaaatattaggaaatgttacaataaatcaaacagaattattaatatcatatataataaaatatagtgcagcaagcatcggcagagctgtgaccacactttttttaagtgtgtgtgatacaaaatgacttgtattgataaaacttaataatcagacttagttgtgatgtgcgtacgaagtacgatgcgtgaggcgcgcagttgcagaaaagtatattataaaaatgtttattacaaaccattctaagtattcatgcttcgcgtgtggaaattcacctaacgcggcgtgcctgcaagcaatatatcacaactaagtaatttattatatgacaactaagttaattattagtgtttatagtttatagtttgtatgacacaatatagtttatataacatgcacttttaaataaaagtgtagctgcagacattgaaggtttagaataaagagatactgtggctcacacctattggcgttcacaaaaaacaccttgaatttttccgtctgtttatgttaacattccattttcttcatgaatataataatagttgctgacgtaaaaacatttctataataaacacaactatgataacaagattatggatagtcaacactaatttagacaacttatttaaggttagtaagtcggtattctttcggggtcaatatagcccagtgatgagtgaatcctgtgattgttaaaccagtttacataatccgataattcatattgcaattgttctaatgtttcatattttgacttttatgattttaaatgtggcttccgctgccgcattgtcatagggacagcctttcttgctcagtaagcagtcgatgtggaatgtctcaagcgttttatcagttgtcaaaccattttcttctattttttgttttactttataataataagtgcttcttggaatgtttaggactttacacattgctgatacagagtatttgtgggcatttgcctttatcacatttactttcgtcctaaaatcagcgctgcttgttttaaaatgtcgttctccatctttattgccgattacgtttggcagttctattattttctgctattctgcagaacggttatctttttcgtgaaaagagccgctagctttggtcatcgtagtttctctttctatactttctattttacataaccttaacttttttgtccagttttttgtagcctttccaaatgtatgtgccctcgcctgtagggtgagtgtgagccataaaggcttgttttgattggccttcaatacaataatataaatacataaaatgccaccgaaattagtatattaaattaaaataatctagtacgtgaacgttcatttttaaattttatttataatgctttttattatatagtcaaagaaaatttatttaccgttatttccgaatagaaaatttactttgcataaatctattgtataaatccttttaacgttttatacaatacatcggcgtctaccggctttgctatatgggcgtccatgccggattccagcgccgccgctacatcttcatcaaaagcatttgccgtcatcgctattatcggtatagtttcagcctgcggatgactgcttgatctaatagccctcgccgattcatatccgtccattattggcatctgaatatccattaaaatcgcgtcataatatcctttctcggatttcagaaaacattctaaggtttgatttccgtcaacagcagattctacctcagccccagtcatctttaaaatctcaaccgctatttctaagttcagaggattatcctcagccaaaagtaacctgtgtcctgaaaaatcgtaggcatttgttttcgcttccactttaggaatctcatttttgcttcccgtaacctcaagcaacgtattatataatgatgatgcaaaaaacggctttgacaaaaagctattgacgcctgcttcacgcgctttggcttcaattcctgcataatcatatgctgtaataataattatcagagtatcatgacctacaacagactttattttttcagcagtttcaaccccatccattcctggcattttcaagtcaatcaggcaaacattataatcctcgtttatatcatgtgattttttaatctcgcttaccgcttcagctccgctttgaacccattttgcagaaataccgaatttttctaaaagcattgaagcgtataagcaagctgctttatcattgtcgcacacaagaactttcatggcgttcatagacggatacttaacggacgcactatgcttatttgccagttcaaaaggaagttcaacagtgaacacagagccctcgtctaaacggctttttacagagattgttcctcctagtaatgtaacaagattttttgttatagccattccaagccctgtgcttcctaacctcggaacgctatccaggttctcctgctcaaacggaagatatatcttctttaaaaattcctcactcattcctcttcccgtatcgctgacagtaaatcttaactttattaacccctttttataaggcagctgaccaacgtcaaggcggattttcccatctcttggagtaaacttcagcgcatttgacaacaaattcagcaaaatctgattcacacgcatagagtctccaaaaagctcttcgtccaaaacccctctgagagattccgtaaattccaatcctctgtcagacgcctgcggatgaattatcgcagttaccgactccaaaagctgtctcagactaaatttttcatggctgacagtaagatttccgccttctatctttgacatatccaaaatatcattaataagagacagaagatgcttagacgaataacttatttttgccaaacaatcctgtattcggtcatcgtttccaatgtttgccgccgcaatagttgtcatgccaataattgcattcatcggagtacgtatttcatgcgacattcttgaaagaaaatcagactttgcactgttagcactctccgccgtcctcagagcatctttaagctgctgtgcctgaatctccagctttttctgcatttctctcaaatctgttaaatcggtaacgtcaatataaagcaaaagatatacaggatagccatctatccaatcaacacagtcgccgtttatctgcatccatgcagtttgaccgtcatagctctgaagcttggccagaaaatgtatatgttttcccttttttatattttcattctgagaattgataacatcgttattggtatccatattcatctgaagcaatctatctgaatcaacattggttccgacttcgccaaaaaaaccataaaaacggtcatttgcctccagaagcttcagttcaaaattatctttcacaagaaattttgccacaaaaccgggaatattattgtatgtaatagactgcgcttttttcatttcaacaaggtcgtttacatttgttataacagtataggatatgggataaccgtttacataagtatcagtatatatccagttcatccttacccaaacgtgtccgccgcccttaaccggcattctggttattgtgctgtactgagatagtcctttttcaattgtctccacaaccaaatctttaatcttttgaagttcatcctcatagtgatgatatttgtaatataagttagggcaattatgaaactttgcttcatattcttctttgcgataccctattaggtcataataaaaatcatttccccatatcatagtaaaatcatcatcaagcaaatgcttgctaacactgacctgcatagcgctcataagaagattataatccgaatcaaccgcaccgttcattaagatatcattcttgtttaactcgtttttttccatacgctttgcctcctttggttacacatatcactcgtccgaaacatcattagtatctaatttttatccgtttttaaatccgtaatattatgacaagctataaggcaagcgtctcgattaccccatcgtatacgggaggcgtccgccatagaccaaatatttgacgcagggttgtaaatctcaatagttttatttttatcctcttttattccgttcatagggcacatctcacatggaatatccctattataaaacgctctgtaacatttcatgcccaattttgcttcaggcgctatttgctgtatctttgcattaatatatttaagttcatagctgtgcgggtcaagaacatatatccatgagttttgactgtcaagtatcattctcaaatcccgggctgcgctaataactcggtcctgagcacgttttttcagaagaaaagttgataacagttccgagataaatatcaatgcgtctatttgatttttggtccacatacggagtataacacagtcgtcaaagccgacaaaaccaacaaacttttcaccgtctctcacggcgcattgaagcactgaccttattccctgcggaagcaaaatattataaagctcctttgacaggtctgatatatcctgacaatagaatattccgttctcatcaaagttatcacgataattcttacccattctctcatagctgatatgctgaagattatcaatctcaggctcaataccgtcgttgcaccactcaaatgtatttgaaacataatttccgtcttccgagtcctcaaaaatatatacccggctcacattataccgccgtccaaccaattccagtatagaattaaccgcttcatttatatcatcagactcataaagcttttggaaagcaagaggaacaatgctgtctatattataattatccgaatcatcagaatcaatctgagtcccggctgctgaaacttgtttctggtacaccccaaaacttttcatcatagagctgtcgtcatacactgcaaactggtttttgccgttatttttcgcatgatacagagccaaatcacaacgcttaaataatccctgaaagtctgttccatcattgggatatatagaaattccaatactggtagtcaaaccgaatttctgaaactcgcttaaatatatatttctaaaagtttcaacaactctctgtgctacttcctctatcattgtcaaaccgccggaacattcaataaataccaggaattcatcgcccccaaatcttgcaatgatatccccgttattaaacgtctccgtaagcctgaaagcgctttcagccaaaatagcgtcgccgaacatatgtccataataatcgtttatttgcttaaagttatcaatatcaataataagcatagcataacttttattctcattattacgttcaagtctgttctgaattatttgaaccgcagtctctttattatagagtttagtaagcgcgtctttttgagccctgtccgacagctcctgtatacggcgtttttcagaatctatatccagtataacccccaccgctttgactgcctttccggaatcatcaaactgagttgtcatacgtatgcggcaccatatatattttccctcggctccggctatacgaagctctgcttctgcgtacggaacgccttttatcactttttgcattatcttctgcaatgcaggaatatcatccgggaatatatgagacagcttttttatttgagtgaaaatatttcctgatattggttcatagccaaatttgttcttccaattattcgaaaacttaacttctccgctttctatatcaccctcaaaaataatatcattggtctggtcttgtattatacggtaacgctccatggttagcctgagttcttcctgagattgcttaatttgtgttatatccgttaaaacacagttaagatattcgtttccgtcttctcccactacccttttgcttttatctaaaatccaaactgttctgccgtctttagttttcaccctatattccagttcctgcgtgcttcctaacgaaagctgctcgttaaaccagtgccttaccgctatatgatcttctgggagaaccaaatcaatataccggttctgaaatttctctttaatttcttctttactgtaaccaaacaaagaaataaagccttcatttatatatgtcacagtaaaatattggtcattcatacactgaagtataccggcaggcaaattttttgaaaccgaagcgccggacttctcgggtttcatattctcaatattagaaggttcatcaatcaagcgccaaactatgagcgctttatgactttttgggttttctatattcacgcgaacagccgcagcttcataccacacatattttcctgaggctctgtgaaacactctgtatcgtgttgaagattttattaaaccatggctgaaaaaattatcaatttgattttttagtatatccaaaactaactcacggtcattgggatgaactgaactctcaacaaaattaataacggcttcctcaaaactgtttccagttttaagcgcctgaaaatcatcgttctgctgataaaccaaatgataaattccgctgtctaaatctatttcaaaaactgtcgaatcaacataacgaagcattgcgaaatattttatttgatcctgagcatacatattatcaatgccggaatgcagcggagacggtacagacaaagacttggcaaaatcaagcttcggcgaatgaccgtcagcatattcccgggcaagctcaaaaaaacttgccttaacattcttcaagcactctaacgtctttggtgaaaacacaccgcactcaccatttaaaatcatagtcatcgctttttcaggttctatagctctcttatacaccctgtcggtagtcaaagcgtcaaaagcgtccgctatgccgaccacctgagcacaaatcggagtattgtctcccttcaagccgtcaggataacctctgccgtcccagcgctcatgatgatatcggcatatattataagcatacctcaaatattcatcatcacctacacggtcaagacccgaaagtatttcacaccccttaactgtgtgggtcttcattatatcaaattcttcttttgtcagcctgccgggcttatttaaaatagtatcaggtattgatattttacctatatcatgaagagctgccgcctcagagataacacgtatggaatgctcattaagctcatattcaggacagcatttcataacctcttccagcaacaccttagtaaacatacgtatacgcaaaacatgctgtcctgtctcaacactgcggtgttctatgatagatgagagagtatccattattacgtccctggattccctaagctttgccgcctgttcttctaccatttcctcaagatgcattttatgccggttaagctctacagcattctgaaccctccgtctgacaacatgagactcaaacggtttgattataatatccgccgctccaaggtcaaaagctcgcacttcgttttccatcgagtcaaccgatgtaataactataacaggaatttttgtcatcaatccgttttgagtcatttctgacattacctgatatccgtctttaacgggcatcactaaatctaaaagaatagcagcaagcgagtccttatactggcgaatcatcataagagcctgctctccgttttcggcttcaagcagattatattcctgctcaaaaagattgcggagaattgctcggttgatttccatatcatcaactatcaaaatagtatctcgattcattatttttcctccatagaacctgcccaaaataacacaattgtgcatcatacgggaaaattcaattcattttttcaatataaataaacagcttaccgagtttcaggtataaaatacatatttctgccgtatttccgtttagtgtataaatacccttattttaatttttagattaaagaagtatatcacgcagcatcatttttgtcaagaaattagacctccgaatatacaatataatatatgaaaataaataaaatattttcactcattatttcataaattgtttttagtataaatatctcttattttgtattataaagtaattttaaaacctaacacttataaatttttttgaaaatttgtgaaatataaagacaaacatataaatataaaatttcatatttacaacatagaaatcaataccacgtgtaaaccggcagcatactcagcacccataaaggaaaaatacattcttaacctcaaaaatcgatcgaaatttataaaccattactatctcagacagccgctttcgtacatccgcttttttcctgctttttatttctatttaaacataaagattattccactggaatttttttatttcgccgagacttcttattttgaagcctcttcttttctggaactcctcttttgctggagtctcttcttttactggagccttttctttcaatggagcttcttctttttccgaagccttcttccttttccggcgttttctcttttactgaagttttttctccgttaaaatgtagagttatttccacaccttaaggtggaaatcataaaacccataagatcaatatcttatgggttttaataaaattagaaattattgggaagaaatctaataatttttattaaataaaagcgttaattgtttgccgtatactctactttatacacatttaatccgctttctttggaatagatgtatacaggagcacccgcggcaatatccaccgtcattgtctgagttgcgccgaccgcggcttcctgcagtatttctgtaccgttttgatttaccgccataaatctcggctcaccctgagatgacgcatgagcaaaagaaattgaaagctttcctgccgcgccgggtgtgaacgccaaatgctggtcgctgacagaacccgctccggcaagtttcagtctctcagtaaacttatcagtgccgatagtttttgaactgtaatctactacaattgcctttttgcttggattaatatataaattatcatatataaccaaaccttcagacattgtcaatgtatcatgctttccgtcatttccttttacgcctaaagcttccattggtacaactccaaatgtccaagtatgcgagccttcttgtgtctccataggataaggtgaagaagtcggagccgacgtcggagcgcttgtagcgtcagggtcgactgttggttcaactgtagggtcaggatttaccgacggttcagttgtagggtcaggtttatccgttggatccaaagacggcaatggtgaagatgaactcttttcaatagtctttgccacactgagcggtgcaatagaattataattattccatatcaaaactttaaccgtttcatttgcaggctcagtaaatccgtttatagtatacgtaccggttcctgatatgtttattgtctttacatttgtcataatacggtctgtgctgtaagaaacaaccatcatagaagcctctccgctgccgctgccgttatactgaacattaacgctcaaaccatcgtttgtatactcagttgaaattatctgatagtcaaacgacgccgggtcaactgtcggcacaggtctgtttgtcggttttgccgtaggattcggaccgtctgtcggcgccggtgcactggttgcaaagcctgctccaaagaattcagcctttgaaccgtctacaaatccataatatgttttacctgcttcaacagctcctgatgtgctcttatattcactcgacgctgaagcatttgtataagaagctaccgtgtttccgctttcatccataatatagaaagtctttcctgcatttaccttataataaactataaacgttccgtcgctctccggtgtgaatttcagtgaagctcctgtctttccgtccggtgaagctgctgtcagtccaacacacttacctgtaaatgctactccgccgattgtctgcttcttctcagtatatgtcatattgtctaccgggcttaatccaggtatacctatagtctcacctgctgtaatattcgctgccggcttccaatatgttgtcttaggcgctgctgttggaggcgctgttggcaatgctgtggcagtcggtgttggctgcgtcgggtcaagagttggtcccggtgtgtttgtcggtttcggtgtttctataggcttgatagttggttttgaggtcggtataggaccgtcagttgttgccggatatgtctttccgctgacaatatagttccaagccattgatgttgtgtattctttcagttttgcttccaatacagtatcaattgcatagctttcatcagctacagaatcatcgaaagtataaataaagtctccgccctgtgttctgccggcaaaagctgttacattgcccggaacattttcagggtcgtcaggtgtatatgtatacattgctgcagcagtgtcaaaattgttatactttgttccgccggctactgtaacatattgctcaggaaccttttcatcacggctatatgctatatatgcgtcaaaacctgtctcaatcggggttctcgcatcaactaccggaactgtacggtcaccggttatagtattattaaacatttttaccataccgccgtcttctcctgaaaacgttccttttccaagagcgtctgttccctgtcttgaagagagaacaggatgatagcagtttctgaaataattattttcaacaaatgctgaaccgccggttgtaataccaactccatactttgcgtttccatcaaaatagttattgtatatatgtattgttccaactcttattctgggatgacgtgaatccgagtggtcaaaccagttatgatgataagtaacaaagaattctcctgtgtttgaatcctgatgcataccgcaaagtgaacactttcctgaatcaaagaaatggttataagacactgttacatatgttgatttgcctttaacatcaacagaaccatctcccttttcctggtctccgcctttgttctgtccatagaaaatatcattgttatgtacccaaatattagtattagcagtatcaagtgagataccatcatcattgaatccctttactccaaaatttcttacctcaatgttatttgccatccttattaggaaactccagccattaagcatagtatcgtctccaataccttcaacagtcacattataacatcccttaacctgaatatatctatcaccgttaagtccgcttacatctgtagagtttatcataccaataaatctgataataagaggtgttttatcataacctttttcacggcctgccataatattggctaatcctacttcatgagtagtgccgcctttgctattggtaacaacatctaactcaactgtgtttattgtatccttatcaatataaagtattattgcgtcatctccgggagttccgttatctttataaccgcctgaagctgtcttgttcggtgaagccgggtcatgagcataaccgtctctgttgtgagccaaaacattaatcacttctgtctcaacagccccggtctcagatccatccattacagacgctattttaatggtatattgacctgcttccaatcctactgcgtctactctataatatgaaccatagtaacggactaattcgtcgtctaccttaatataatctgtatccccagcttttttggtatatacattatatttgtctacttctgccgtatttgtccatttaacaacagctgattcaagccatcctgcctgctcaataattttaatatccgacggcagcggctcaacaggtgaaacctgtaactcattcgaatctgtagaaccgtttttatttgaagctttcacaacatatttatatgctgttccgtttgtaagccttgtatcctgatacgttttatcagtaagccctgtagctatagctgttccgtcgcggtacacatcatatgaaaccgcatactgagccgctgtccagctaaggtttaccctctgatttccggcggttgccgtaagagtgaaagttcccggaggttcagtaggctctttaggagtggctgtcactgtgacgccggcgcttgaacctgccgagtttacagctttaaccacaaatgtgtgttcaacatcgtttgtcagttcgccaatagtataattagttgatgttgtttctataggaacacttgaaccatcaacaaatatataatatactgaagcaagacttgaagcttcccaatctaaatcaacctgactatcacctattgacgctgttaaattagtaacatcagcaggaggttcatttgattcaacagtgaataccgctgttgaaagataagcatgattagcgcttacatccactatggtacccgttccatcatccatcttagtaggcactgttacagccgttattttatatgtaccggcaggcatattagacaatgttaaaccgtcctcagcagattttcttccatacatctttccgtccggagctgttatcataaagccttttgcattattgctgtgtaaacttgagaatgttgcgctccatacgctgtcaacgacgaatgtcaaagcgtcagttgatgtttttgtaatctgaacatatgatttgctgtccgaggctgcggctgacaccgtgccagaaaatccttcaaatccctctgttccttctgcaagcgtcttagtggtcaattttgtaaaatcatacactgtagtgccaaccggaacgaccgtgccgcctaccgcgttaacttccatgaaaccaagtccggcaaacaatgttatcatcattgccaaactcaataccatagcaatagtttttcttgtaaaactacccattagaaattcctccttaaatttttatatcttttcaaatatatttggtgtatttatactaatacataatttttttaaattcaagtgttttttaacataccgcaaaataaccagtaaagtaaaacaagaattttagcctcctattttaattgtgcaatttgacgatgtttttttcattttatcacatccatattattaaaaacatcagtttttcggaatattcaagcacaaaaatatgcacaaagcatatcgcttcaccattatagttgtttagttttttggcatttctttatttttttgccatttctataaataccagcgaaagtgctttagaataccaaatgttaaaaaaactacaatatatactgataatttaaaatttattataactagatagtgtattagaaaaaagaataaaatatacccgcaaaatttataatataataaaaattttataaaatttacagacgaaaaatatcattaagtaaatttaaaatgtaaagtcaattcgactcttaacatattattatttgattcagcagaaattctgtaaaatccgattttaacaatttatctaaaataatagtttaaaataaacaaccatataacagtgttaaaattttaaacatctgccattaaatataacgtttgaaaattaacataaagccagacagaaaaaaattaagaatatttttagagaacatcaactgtaccgtaaaaaagctacaataaattggacagataaattaagtttatatattataaaaaagtcccataacagtgcttaaaatactaaacatctgctatgggatataatttttattcaatatactctctaagcctaaactttacaccgcagtcttcagctatctttctgcatatctcaatgtcactttccggtatagttttatctaccacactaaagacaacaagtttaacataatcttttgctcttttcgcaaaatcctgcaaagcctcaaaagactcttctccatatctgctcttgcatatatcctgatattctttagcgtttgaagcatttaaactgattcctataatatctatagcgccatcaagctccggagtgacatccctgccgttaataagatttgcctgaccgtttgtgtttattcttataacagaatcagttttttttgactttatccatcttgcaatctcaattaaatcgtcaaacctttcggttggttctccatatccgcagaatactatctcatcatattttgataaatctcttttctcaaaatcagcttttatctcctcgatactcggctccctatccagccaaaggtcatcctttccgttaacattatcatgttttgtcctgacgcagaaaacgcatgcattcgaacagcggtttgttatgtttacataaagtgaattatgatattcatatgttatagtcaatattctctcttcctttcaaattcaatctaaaattaaacaagcttctcattttttataatctgataaagcgccaaagctatcagttcaacatccacaagattgtcattattccccgctgaatcacgcagcctgagaaaatctccgctttcctctttggcggtcaaattcagcactactgtaaatactgagccgccttcttttatatttgagacaagaatttttccatccatatttccggccagtttctgacaaaccaaaaggccgtatcccttatatgacctaagcaaggtcttgctaccgtcaaaaacgtcattgatgttccgttccataattgcatgaatctttttcaaatcgacgcctataccataatccacaacagagattgcaatgaatttttcttttttaaaactatttaatataatatcaacttttctgttttcagagtgactgtgaactaaagcgttaacaagcagattgaccagtatatgagtaagccctgtctgattaatactggcgtataaatcatttcttacgttgttacgcaaagaaatatttctgcacattgaaacaggcagacagttatgcacagttttaacaaactcatttaaaaacgcactgatttcaaccgaatttcttgtttttaaatttatgccatatttcccctgggtaagctcacatagatttcttaggcgcaaataagttgttcccatagaagaacttgccttatatataatatcaatattatcaggtttaagatcctcagactcgaccaggagtttaagaagatttctgacataatatgtattatcttcaataagttttactatataatcaatatcgttttcaaatgttgaatcaaaggcgcctacacgtaaaaccaacttttcgttttttaaattatttgctaaaaatgctctgagatttttagcgcttaactttccgttttcgcctatacaaagctctttaacagaatcgttcatatcgggcacccccaaatctttagaatataataacacattttatataatttttcaacagtgatattatattattttaagctgaaaaattttatctactatccacttttcttagcggctgcttgatttaaatatactttcagcaaatagttcgatattataaacttcttaaaggatactattattctgttctcacttattccatatatattatcccattacttacttgcagcatattcaaataaactaaatatatccttaatgaatctaatattttgcatctatttatatattttcctgccgctgctaataaataaaaagttaaatcattttcaaactccagcattaaatatccaacatcaacacaaatcaacaaaacctgtaaaatgatattttatttttttatactatctcaattcatctcgcattatttataccgctctgcccggtccataatattccctgtttaagtctttcttatatggtcagcttgactcaatacatttggatatcaatagtatacagtactttaaactaaataaacataaaaaactaaaacggagctatataaatttctaaccatttaaaattaaagtgtatgatgaattttattttaaatagttatttctttatatattcaaaaactttctgatgtttttactccgtttcagttttttatgtgcacgcttgtatatatttacatcgcttcttagtttcctgaggatgatgtttatagctgcatccccaggaaacatttctaatttattagaacaataatagcagtgccaaatatattttatctatattataatttttttaaatccccattttcttgtctttcctctattattacacttccatccatagggtctattattacgactacattggatgtatttaatatagtaattaaatcatttttatcttcttcattcgcattgaacaaaagatgtacctcatatacacaatctgcccaatcagcagttggctgtaaatatgctgcatagtaaaaagaattttcatttatataatctgaataatattcctctgtaatagctttaccaatttctaaagcagtctctgaactttttattaattgttcatcttttcccgcttgttttaatgttatttccttactctcctcactccactctacatttttagaaataagtttcgccaaatcccttaccgaaatatatgtattattattatatgaaattataggattttgtaaataatcgcttatacgtccttttattgaatcaatctgtccaaatatagtataatcaactatattagcttctattgtttcagtagttagcgcaaatgtcaccatacttataaccataactactataaaactcaatacaataataaattttttcataaaatttctatctcctttcgttatataattctattgttgaagcaattatactttgtataaaatttgattaaatatcaaaccatttagcgaatcagaaaaaatattactgaataaaactatttgtaatttagtttaattaaaaagtcattaataaattatatcgtaaattattattatagtttcatacgcataaaaaactgaaacggagttatatgtattctctaactatttaaatttaaggtgtttaatggattttattttaaataattaaatatttttatatatacaaaaactttccggtgttttttactccgtttcagttttttatgcgcacgcttgtccagcttttgagggattaccggagtgtgtaaatcactttacacactccataacaattttagtttgtataaatatctactctctgtaattcttcatcacacttaccatatacactttaattgcaatttttatttgcatacttaacattttctatcttcacactctttaatagcatatattgcattatcaaaactcataacaattagtttaaatatccttagattacactaaaagttaaaattttaatccattatatcatgtatctcttcaaaatcaggtttcgttacgcttggtcgtcctattcgcctataattatacatttgagcataatcacctatttgtctcgtatgtatatataatgcttgattaaccaagtataaatattcatatgctgttatattttcttctaactgctctggatacacattcatttcatattcacttattgcatttttacaatttattattccggtatctatacaaaattgataatatggattagttacattcggataattttctgaataatatttttctatgtacaaatccgccaaaaagctagaacccccagaagtcgacagcattttacatattgttataaatgcttcattatatttcacgttatcatcaaaatttgcatataattttccatctcgctcttctcctgctaataaattataacgaaataaactagccgctaatttatagtcatatgataatggttcaatatcacaaaattcaaattttcgtgccgtcctgaattttccataatatccattcatcccatttgaccaagaaatctcttcgagttcactttttaatctttcactagaataactattaacccagcttataaaatctctacttgatgtattaaatacatatgctatttttaaagcatctctgcgagtgattaatgatgtctcatcccaacgtgtttgtacatctcgaacaatatctaatcgttcaaggttttcgattgcagctatctcattaccaagtttatactgttcttctaaattatactctgtatcatatatattttctgcaaaaacaaacgtatttgtcaacaatattattattagcacatatactacttttttcattattttatctcctttgctcttgaaataatgtcataccatataaaatatgtattaagtaatgtcacgccaggcatactttcagttaaatcgtcactaacttcccataaaactgtgtaaggcaaattttgtatccatgccccataatcgtttactcctcctatttcacctcttgatttatctcttttagaaaaacccatttcttgacggtatctttcttcaacagttattgctattgcttcaccatgctttttcttggtgtcaatatttccaaaatctttattcactgcaaatatatttgcagctttcatagcaccaaaaacctctgaatatgtatgagctgcttcgtgaattaatattgttgaatactcattcatcatattgacatctgcgttatctatatctatatttatcagatctatataatcaatccctgcagatgaatcatatatacttttttcatctgagtttgtaaaactaactttaatttccgaatcactacatattaaatcttttaatagcgctttccccgtctcacttccagtatctatatcatcatagtcccaattatctttatctataataattgaatcaccgttagttttataggctaaattaaaatcatcactgccaaaaacaatttttgctaaagcattcaacttaacatatgactcttgactcataacaaaatataatccccaagggtcaacaaagttcacaggattattaccgcagtacgcgtaccagttcaatccgtcttttgccgggtcttcctgcgtgaagcgtccttcgtttattttgtaatacctgtttctcagatataccattccgctttcgttgtcctggtattctccgcagtatttgaacggcgtatttatataactctttattgacgttctattcccatacgcactatagtcacatttggatactgtcgccccgtttgcgtccgtcagcgttactgtgttcccgtgtccgtcatatacatagtagttcactgcgtttttcttattctgcgctattatatttattcccctataatacgttaccgctcctgttccgctgtatcctactatgctgcttccatcccaacggtgcgttggtcgctccatcgacctttttgcttgctctccttcctatcgcatcatatgtatacgttgctgtttctactaatatattttaaaattctttttaactatatgctgtgtttctatttgcgttatatgaaaaatatcttttattgtttccatcttttatttttaattaaacaagctataatccaacccaaaatgataattattaatgatgtcgtaatctgcaacataataatatgtactgtctcgctgtcagggttccataagtttccggtggaaatcccccagttaaaataactaattatatgtcccaataatgtcaggctaatcatcaatagtaaaaaatataaaaacttgcctatgctaaccttattcaaatatttatagctaattattatcaagtatataggtataactaacgttcctaataatagctcaattaatgaaacaccagcactgctagcagaaggtatatccagaagccaaaacggtaaaaacattaaatgaacaataactggtattaaatatatcaaaatataatttcttctcattagtcatacaacctcgtaacagcatatgaatacatgcctttattgtaattctgtgcccaatcacttcctagtatttttatatacgcataaaaaactgaaacggagctatatgtactttttaactatttaaatttaaggtgtttaatggatttttttaaatagttaactaattttatatacacaaaaactttccggtgttttttactccgtttcagttttttatgcgcatgcttgtccaactttttggttaccggagagcgtaaataattacgccctccgtaacaattttactttgtataaatatcaactctctgcaattcttcgtcccattctacctgacagccaaatgcttctgataccgctcttaatggcactaatgttctgctgtcttccactaatcttgcaggaacatccagttctatttcttctccattctttagcatcctattactgtcaattgtcactgacactgttattccctcctttgttgctgttgccgtttgggtttcattttcccattctacttctgctcccaatgcttcgaatattgctctcattggtactaatgttctatcgttttccattactgattcatttaaaaataatgctttttctatattagtatgtaatattataacatttgatatgtttttattttctaaatataaatcaactcttttgttatctatattcacaattatatcgctttttttaaataatcttgtacaaattttattaaactcttttggataaatatacatatcatcatcaaatatttttaaagcagaccacgcacaacaaggttcgttatatttttcttcatcaattatttgaataccgccttgagttggaaaaaaagtttttaaacttttatcactatattttatattaaaattctcttcatattgactaatttcacatcctaaatcatttaatatatttatatatggaagccaaaaacaatttccctctatcttacagtttacgtttaataaaagcatattatttaaataaatctcaccgtttttaacttcataatgtttaatataagattcaatagtatatttattgtaagaataatctttataaacttttttatcactaagctcaggactaatatttgcattaacttcaaacatatactgtgctctatcagtatttaaccataatataatacttggattatcggtattagaatctatatcaaacaaacaataatctaatactttaccatctattccaaaataatttgaaaactcttcaaccgattctattttagaaaaagtctctatcaaatccggcttgaccattatcataaaacttccgcaacgaggataactatcatttaaatcataaagatgttcaaactttattttatccatactacttatacgttctaaaatcaaattctcctccaataatatatattctttaaatttgtttgaagattcttttaattgcttaacattaacattttttaaaaacgtatcaaacgaacttttatctatagaataaatttttattgattgctcatcgtactcctgagcttcacatataaaaaagtgtgtactaaaaacaaaaataaatattaatagtaaaatttttaatttcatacgaattatgcctccttattaataaacaaattcgacagtatatataccgaccaataatttatacgcttgtcccactttaattaatttctctaaggatgtaataaaaatacatccctagatttattaatctaatccatcttttaaatattaaacagaaaagcaagtttacacactatcaatatgatattatttttaatttatttttttcataaacataaaaccatttttataataatacagaaaatcatctagcaggtaacaacctacattttctccatatttgccattttctctaaagcttaaatcactgcattttaatcctagagatttagtttctaacgtattaatgttatatacatataagtttaaattgtctcccggaaaagtaataaagttatcatttatatttataaattgttctattgataaaataccatcattttttaatattttaaaatttccattttccatttcaataacctctattgctcctccatctctaatataatacattttattttgatttattaacaacccaaaatattcacttttagtacagtacaattcaacattgttttccccatctaaatcactttccattaatttatatccttctctatcttttgcaatcattgaatatattttatcatcgtatatccaaaattttaatatcttttcactttcgtcgcttaaaacttttatgccacttccatcataattcattgataagagttgaaacatacaactattattataattgtatgataataggtatagtttatttttatatgtatataaaaatgtgacgtcatcattaaatagcaacttttcgttttccccttctttattcatagaatagactcttttgttttcatccacataaaatatttgatctttagttatatttaaataataaaaaattccttttttaatcatttctttattacttaaatcataattgcttctatataaaacagattctccaccttttaattcattaaaatataaattttcttcatcataacaaaaaagtccataatttaaaagatttcctatagaattaccatcatttttattaatgtctatattaatagatttatcgcaagcagttaatataaaaaacaaaaacattataaaaatactatataacacaattcttaaaattttattcaacatgtcaacctccaaactaaaaatatattcctgaataaattatatattagttatattttgtatttctatatacgcataaaaaactgaaacggagctatatgtattctctaactatttaaatttaaggtgtttaatggattttattttaaatagttagtctaattttatatattcaaaaactttccggtgttttttactccgtttcagttttttatgcgtatgcttgtccagatttttgggggattcccggagagcgtaataatttacgctctccatgacaatttagtttttataaatatctactctttgtaattcttcgtcccattctacccgacagccaaatgcttctgatattgctctcaatggcactaatgttctgctgtctcctactaatcttgcaggtacatccaattttatttcttctccatttttttggatatgttattaaaggctccgtacagctctgatacatttagtctcagattcagctctgtttcacagtttattatttcttccctgcttccttcatatcctccgccgagtaacattacatatactgctattcctttattattcagttcttctatcttttcttccaatgcggtcttatctgttattttttggacgaataaagttatcactttgttcccatttgtggatatactttcctctgcatttaacgcttcctcgcatcgtgcaagcatagtttccgcatctgttgttcccgaatattccttggacatcattagtcccagtgaattctttgcgctttctgtgtcttttgcatatccatagtttgtatcgtccactaaaactatttctgttcctttatttgccgaatctttcagtccttcaactgaacttgcccatctctttgttgaaccctggtcaaacttcttttcctcttctgtatataccggcatacaacaaaagatactccgccactcaaataaactgagcagcggaataaatattcattcagttgttattattgcagtattagtagcttcgttccactctacattatatcctaagttttcggataagaatctaagcggtaccattgttttgtcatttagcagtcttgccggaacgtccatttcagctggatgtccgtttactgttgcatttgtgttgtctatagaaaatgtcacacttttttctgcctcattgctgaatgtgcgtattctctgatcagcacttgtcggcagcgttgctgttgctgtctctgcagactcattccatgttacattggctcccatctgttcaaacaaaaaacgcattggcactagtgttcggtcattttccactactggcggttgtgagaatcctagaattttgtcattaagttgaacataaggggttctggacatttcatcaagtactcggtttatatctgaaagagatatttttattttattttcataagcagattcaagtataagtgaattcttaacaaaataccatctttgtattgttaccggattagaacccatttgtcgttgtacatttaatatttcatcagcattaattggtatttcataaacaccatctttagaaaagtaaaaatatcctccaccattctttataatatatggaaagttagatttcgacacacctctttttccagaatagttttcatgaacaatatctataaatgtgtttccattgtcaaatgatatatcattatattttaaattccccctatatataatattttcgcaagtttctacatcattttcataatcataataacattcttcccaatttatcatgtcagttgatttacataacttatgacctttgtaacctggagatagagtgcaataaaatattccattattacacgaacaactaataatataactacccatcattgtttgagaaattaaattaaatttatcatcataaaaatatacataaaagttactccagcctttccaactatcaccaccggcaaatatagtagaatatggtgcaggatttttccataccatatatccagaatctatttttacataatcgtctgcatgcaattccttaataaaaaaattaaattcattttcattatatggtttagaaacagaagaattggctaaatcaatataatattgtactcccataaactcaaacatataataattacaacataaagaattctcgtagtaacgttcatataacttcactaatccattggtttgtgtatcattagattcaacaatataattaattcctaattgatttaaattaatttttgggtcatcatctactacatatgcgttatagttatcatagttatcatagttatcagaataaacactgctaccaaatatactgataataaaaattaatattataaatatttttgtaaatgtttttttcactattctcttctccttatttttgaattttatctaataaatttttatagtaaatatctgaatgctctgaaataatttcattattttcatctaatttatttatagtataatattttatatcaccgtcaataacaaaagcattatgtaatgttggattgcttcccgtcatcagtgtagtttcaatattaataatagctgtttctccagggcttatatcataattaaaacactctgttgataaccatacccaataaggaacattcttttctattaatccattaaccggtgttttaccaggaatagtgctattaattgaataattgacagtataacacattccttgtaggacatatgagaatttttttgtaacttctgatatatttgttatctttaatctatacttatgcgttacaccgaaaccattcattccttgaactacagctctagtcatattatcagttgaatttggatcaatggatgtatttttcccctgaaaagtttcgaaggcagtattatcttttcctacaatgctgtgcatccaattattatcgaacttctctcccggctttatatattctttttcactgtataaaccaactttaaattcatcaggcagggctgtatcaacggtttgtttggaatgttctgtatcaaatatccactttccttcagaattgttcggtataactgtactttcaattgcaccgttttcagaatttcttatcactcctccatatggcaaagcaatacttatttctgaactttccggcgttgtatatctattattagtagtaaacggtgacatatttgttgtaaagaattgctgccttgacatgccatttaattgattcttcacatatactggcaatagcgtctaaattatataaaatcaaaagatactccgccgctcagtttatttgagcggcggaataaatatctattcagttgttattattgcagtattagtagcctcgtcccactctacattatatcctaagttttcagataagaatctaagcggaaccattgttttgtcatttacaagtcttgccggtacatccattgttgcagtttcaccattcactgtagctattgtatcatctatagaaaatgttacacttttctctttttcgctgctaaatgtacgcatttgtgtatcagtatttattggaactgttgccgtagctgtctgagtttcttcgttccagttcacatcggctcccatctgctcaaacagaaaacgcatcggtacaagtgttcggtcattttctattaccggcggctgtgaaaagcctaggattttgtcgttaagttgaacatatattttattttttaattgcgatataggtagtctataaaaacaatccatatatagcggttcaaaataaatatatttttctgttgaccacgaataaaatgtttttcctccgtatcgacctttcgaaaaagttggcattactactccatatactccatcaatactaatatcagtagcaattaaacttttatcatccatattataaaaataacaatacgtcggatatccgttatgtaaagcagcaccattatttttggattcttctcttattatgctatattcatttaagttaaatttattgaccaatttatcaggataaataaaatatgaactaacagttttctgttcattaagatatgatttgctatagttttccttagataaagtataatcatcgctattaatttcaattctatttattaaatctgtacttttataatatgtatcgactctttcaccaactcttttatcatctatataagacacattactgtaatccctgtgtttcatataaaaataaccgtcataaaagaattcaatatcaaagcaaccttggtattcaataacattaattagatcataattatcatcaaatacttgtataggtgaattactatgttcaccaattttatatttttctaaatactgctcattattaccatttgtatctgtataatcttcaaatccaacaattacatttaatccgtttccagaaataaactgctcaacattagttatataattctctggcaaatatgattccggaaacttatacttaaattgcagcttttttaaatcatgtattccatctgacatagaaacatatgcagaaccgggttcagaatataaatatttattattaacaactgctctacggcatatatttatatctgtttttcctttactaataacttcaaaatatggcaaatcactttctaatatttctgttgcattttcacttatttctttttctgtggattcgaaatatacccattcattttcttcaagataatatcttataatattaaaacattttgaattatccattaaagataacaatgtatttgatgtctgtattttatctgtttgtccatatgtatattctaatggcaattttaataataaagtttgcttgcttccatcacttatgtcaaataaagcagcttctattctattattctgattactatctttatatattacataatgtgactgttgtacttggggcaattctggaatatattcatctgcagaagctatgtacgcaaataaatttgtcaaaattacaattgcaaatataattattatttttttatttattttattcatattttttcctttctattctactcgtagcatatttataaatccgcctgttccaatatttggtatttctgtttcaagcttaatgttttttgaattgttaggttcgattgtgacgttaaataactcatgtgccacaaaagaaccatctactattgatttttcagatgtgtcacatttaatgtttgtaattacggggtttccatcaattgtatattgataaaaaaatgggcttattgttcttaccataaatgatatttttcggttttgcgttgtattattgtttaacttaatattataacgttcaattacactaaaatttcccattgagcaagaatctggatcataatagtgtcctgtttgagctccgtaatctaatatttcttgtgttgtaattacaccgttccctttattaggacgtttatgaaatggatcaaagtaccactttttttgttgtccgtcagtgaatgtatatcccattatatcagaaatatcacccgaataaaaagctgtataatcatttgctggatttaatttggtagtccacgatattgaattttcagagttttctacaacagcattgtccataccactatagaaaatatattgattattcatatctttttgaatttttgaaccattaggatttcctaaattaaatacaattgggctataataattattgttaatagtgttattgtcaatattccacacaatatcagtctcagtttctgcaattgaatttgttttccctttagctttatccgccaagtctccttcaaattcatctctgttacctgtaattacatctggatcttgtggtaaattaaaattaccattagaatctattacgctgtttacgtcattaaaagcaatagaagttaattttatgcttccaacaccatttataggttctcctgtttgggttaatgtctcaatattcaacctagcaataacaaaaccagttgtgctactacttcctggcgaataaagagccctatatgcatcgaataaatcaatggtttgaccaggctttaatatagcagaaccattcatttttgaaagtctatatgccaaattttcatttatatcattttttttagtattagaaatatattcatcgtatttataactttcatttttaacactatttccattaaacttatatggttcggtcaaatcgcactccatataatcagcccatgccgaaaaagcagtgtaatctaaaactgtttgacttagccattgtgaattcaaatttgtatcaggtctgattccaacacgttcaacttctatactcacagaattttgactagtattagttaaaagatattcaaaagccactttactattaccatacgataaacaattccaatgtatcatatgcgatgtagctatatcaacaattccggttaaattatcttctacaattaatgaactatttccatacccctctttagcatctgctaaatcttccgatatcaacatttcaggtctattatcataaataaatgttccatacctatcaggggcaaacactaattcatctgtttttggattcgttattttaaaactatagtccgttttgcttgtatttacctttaaatatacattttcaccctttaatatattataccttccccctcctgataaatcatctagtccccgtacttctcttttgttcatatcacttacttttaccgtacaattttttatatcacttatatgataatatcctgtcttaggagccacaaagaaaaattcacctgagccgtttttgtccagtgacggctttactgtaaatgtatctatgtttgataaatctatgtagtttgcttctccttcattaatcacttttccttctctaatccttcatcaagcacaaacttacactttactattaacttcgatgcttcagctctgtttaatttttcattccaatttatatatcctgtatcggttccatccattgcgccatttaagtatagctgacctatctcatctttacaatacagtatctctccctgatccttaaacgctattccggctttccatcttgtatttctttcgcatgatacattttcatcatatttatatagattggatggtattctcaggtttggctgatttgtttcgtctataaacattctgtttatcatatacgctgcgtcacaccttggcacaaatgtatccggagtgttatctcccgttacattttctatggttattatatttttttctattccatagcatatatatttctttgcccagtgttcttttattaaagctggcatatgtgattcctgtttcgatactgcctcatttatttgctcttctgaaatatctgccaattctataagtatttttaaaaactcacttattgtcacctcgtcttccggaagaaaatttaaattttcatctccgcctatggctcctaaattggtcgctttaaacaagtattcatagtaccatgcatttttaacctgttcatctatatattgtttaactaaataatattttgtcgagttatatatttcaggaaccgaacctttatatattgttttaaccccggataagaattcattatttgttgatattcctgttaatgtgggcataccatttctaacatttaaattttcgttttcaaatgttgttccattatatccaacaaactttatatccccattttttaaactaaagtttttggtacattgaaacttatcttatcatagaatacgttattaccgatatattcatcttttattgaggtcccgttcgcaatttcaagcaaatatgaatatgtatcaattactccagcaattttactttcatcaaatttatcatcatacttatagaaattatatccattattagaacctattataattgcatatttgttcgcagaatcttttgcaacgactggaaaacgatatttcaagttatcctctattgttttgttaattgatggagagcttgtaatccatgcgaaatcgctttccatttctgtataaaatgcatacatattacttaaatcgcttccattcatcgcatgtgcatttccatttactaaattgtatacatcatccggttcagtgaataagtcatagtctttagtatctccctcgcttttactagcgatagccggcaaacatccataaatgtttaaaacagaagcaattgacacaccaaattggttggtagtaacattagcaaaatcatgttttcccgctctaaaattgcttagatattcagtaactgctctggattctccattctctgaaagactcataacctgtgatatgttattaaaggctccgtacagctctgatacatttagtctcagattcagctctgtttcacagtttattatttcttccctgcttccttcatatcctccgccgagtaacattacatatactgctattcctttattattcagttcttctatcttttcttccaatgcggtcttatctgttattttttggacgaataaagttatcactttgttcccatttgtggatatactttcctctgcatttaacgcttcctcgcatcgtgcaagcatagtttccgcatctgttgttcccgaatattccttggacatcattagtcccagtgaattctttgcgctttctgtgtcttttgcatatccatagtttgtatcgtccactaaaactatttctgttcctttatttgccgaatctttcagtccttcaactgaacttgcccatctctttgttgaaccctggtcaaacttcttttcctcttctgtatataccggcatacaacaaaagatactccgccgtgcgggttacaccgttctggatatatcttgtggcaacgttttggcaacacctgcaacataaattgtattgttccataaatatagagctaactgatttgatttatcagttagctctttttgttggggtctttagacgtggaaaaaaaccttcggttctaccggaggaagataaaaagctttagcataagaaaaatctccatgatataatagtaaatggtttggcgaccgcattacaaaaaatatatcatggaggtttttaataatgttaaagaagagcacaaatgaaataaagagcacagcacactcaaaatacaggtgtcaatatcacatagtatttgcaccgaaatatcggagaaaagaaatatatggtcagttgaaaagagatataggagaaatactccgaaagctttgtaaacaaaaaggagtagaaataatggaagcagaagcctgcctagaccatatacatatgcttgttagtatcccaccatatataagtatagcacagtttatgggatatctcaaggggaaaagttcattaatgatattcgatagacacgccaatttgaaatataagtatggttcaagaaatttttggtgtagaggatattatgttgatacagtggggagaaataaaaaaataatatccgaatatatcaggaatcaacttgaggaggattatgcatcggatcaaataagcatgaaagagtatttaaacccgtttacgggtagcaagaataagtaggcaaaaaatacagccgcacgtgagcggctgcctgtgatagtaatgcggtgtcaaacttctgtgctccttacaggggttaagcctgtattagccccttataggggctgtgcaagccaccagtttactggtggtcttgacttaccaaaataaggaggtggaacagcatggagaaaataatatttgattattactatggtaatcaggcggagcagtacagcttttaccgtataccaaaaattctttttaaggataagacgtttaaatcactatcaaccgatgcaaaggtattatacggatttatgcttgaccgaatgggattatcagttaaaaacagatggtttgacgatgaaaacaaggtatatataatctataccttaaaaaatattatggaggatttcgggtgtgccgataataaggcaacaaaattattgaatgagcttgataaggaaacaggaataggcttgatagaacggagacgtcagggattggggaagactgatattatatatgttaaaagctttgttataacgccggagaaccagcacgaatccggaatcgtgaaaatcacgagcaattaatactaatattaataatactgagtataacaatactgataataataaaactgagtatataaatcatcaatcttatctatcgtgtaatacagcaagtgaaactttttcaatggataggattgaggattatgaaaaatacagagagcttgtaaaaagaaatatagagtatgagggattaattctgcatgaggaaaaagaggtaattgacaacattgtggatattatggcggatgttctgacttttccggctgaaagctattatattaaccatgtacagtatacggctcctgtggtaaaaagtattttcatgaaaataaattacacacatatcagcaatatgcttttggcaatgaatgaaaactgtacgaagatacgaaatgtacgcagctatctgatagctgctatttttaattcatacagcacctcagatgtatatattgactggcgtgtgcgctatgatatgaaaaaatgagagagtaggtgatagctattatggagaataaaatattaaaaaccggaaatggagacaatacagaaataatacagactgtaaacatatcagaactaaagccgtatgagcagcagccgtttaaggtattgattgatgaaagtatggaggagattatggagagtataaaacaaaatggggtattatcgcctattattgcaagacctcatagagaaggcggatatgaaattctttcagggcacagacgtataaaagcatgtgagcttacgggaattacatagattccggttgtagtaaaaaatcttgacgatgatacagcggcaattttactggtagacagcaatttacaaagagaaaatatcctgccgagccaaaaggcttttgcgtatcggctgaagctggaagctatgaaacgtcaaggtgaaagaacagatttaacatctgcacaatttgtgccaaagttaacagcacgggaacaatttgctcaagaagctggagtaaatcttatggaaattacaagttacatacgccttacgaatctaattgacccgttacttgaaatggttgacgaaaagaaaatagccttaaatgcagctgttgggttatcctatttaggcaccaaaggaacaggcagaggttctaaattcaatcgaaaaggaggaggcttcaccatctattgcacaggctgcaaaaatgcggcgtttttcacagaatggtaagctaaatcccaatgttatagattctattatgcaggaacagaagccggaaaagattaaaataacattggcaggtgataaggttaaaaagtatttcccggaagattatactgaaaagcagatagaggatgttatgataaaactattagacgactggtataaaaagcggcagcgtaaaaaggaatatgaacgttaaagcggtatctcatgatattaagggataccgcttttatagtggaggattttatggatatccaaagaataaactcaggatatttaattataaatcaaattaaggttggcgaaatagaaattgtgctggatgttcaccccaaattgcctaatagctttgttacatggaaatgtaaaaacggtgactattactattgggggaactatcatacaagcctgttgtcggcccaaaaagatttctgtaagcgtgctctatcagaaataagaaacattgaacagatatataaaaaacaaaagcaaatagaaaacgagaggttaaggcatgattaatagacctgttagcattccgctgttcaattgtatatatcaataataacttaaatataagaaaatcacatttgtgtgcgattcttttgtgcgatagaacgatatacgttgacatttatggtgattattgatataatattttgtaagattaaacaatgtttcggaggtgtcttaaatgaggataagttataaaaagctctgggtactgctcgctgaaaaagaactgagcaaagcagagtttcgtgatgctcttgaactgtcaacaggtactatgacaaaattaaataaaggcgatgaagtatccttatctactctccttcgtatatgcggatatttcaaatgcaatatcggcgatatttgtgatgccgttgaaatttaatagaagatatgctcatagaaatttgttaaacatttagatgcaaagttaagagtttctctatttgcactaaatttgaaaggaagtttttttatgcttcaaacaccgtttcacgcatattatacagctatgaaactgaatatgctgcaagatgagaatacacttcttccggtatttgcggagggtaaaattgatgtgtatccttatcaggttgcagccgcgctgtttgctgttcgcaacccttatcaaaaaggcgtgattctgtgcgatgaagcaggtatgggaaaaagtcatgaagcaatgttgattatttctcagagttggtatgagggcaaaaataatattttaatagccatcccaaacccagatttgcttattcagtgggctgaaatgatttctgaaaaatacagtataccattttgtattgcatctgagaataattcctttgtctatgatggaattgtcattacaacatatgaatacttaacccagaatattgataatgctgataaaataaaatgggatattattatttttgaagaagcaaattctctttcatcagtctatcaagatgaaaatacatttataagaggcagcggaagcaaacaggcaaaactgttaaaggagttttcaaaaaacacttttaaaattcttcttacaggtacgcctatcgagaaaaatataatggacttatacggtcttatattttttattgatgatgaacttctgcctgatgctgatacgtatatgaaaacgtatttaagaagaccggaaaattatccggaacttgcagctaaagtgagcaaatactgtttcagaacgcttagaagtcaagcaaagcagtatgcaaagattcctgaaaggttacatataacacttgaatatgaagcaagcgaaaaagagaaagaattgtataaactgctttttgcgtatatagagaagccacacaaaatagctttcccgcaaatggaacaatatgatttggctcttatgcttttaggacttttatcctcctcaacagcggcgataaagatgagcttgaaaaacataattaaacgtctttatatatccgaggaaaaacaggaatttgaaaaaatgattgcgatagctgaaagtataacggaagattcaaaatcgaggctgctgctcgctgcattggaaaagctgtttccgcttttaaagagactgggagcaaaacaaaaagcagttatatttactgaaagtttggaaacgcaaaaatatctttatggtgtgctcaaggataaatacaaaacgcttgtatataacggtcaatccaatgtaaattataatgtaatcaaacaatttaaagaggatgcgcaaattcttatctctaccgacaacggagctaaaggctataatcttgaagaaagttcacttgttataaattatgatttgctttacaatacgctgaaaatggaacagcgaattgatagaatacacagaatcaatcagcaaaatgattgtatagtcctgtcttttataaataaagataattttgctgatgttagaaagcttgaacttgtgtcaaaaagacatattttatccgacggagtttttggcgtatcggatgcagttatgggcggcttctgcgataatttggataaggcaataaaaagtcttaacgtaagaacaaaagcccagattgaaaaagattatcagataacacttgcacaaaacgagaacaaaaataaacaggtcgttgagtcagccgaggatattctctttaccacatttacaaaggaactgtcggataaaataaagataacaccacggtatgcagaggaacaatcaaaagtaatcaacgatgaactgtgggagcttacaaagttttattttgaggaatataataaaacacatcaagattgctattttgaaataaacgaaaagaataggactataaaagctgataattatacaaagcttccgcacttgttttattatcctaccaataatgggaataaaccatataaagcaattaaagaattcaaaaagttctcactgctgtctccgctgtcaaaggggattacctttaatattagctgcgccgattacggcagtataaaggctgattgcgaaaaatgcacaatagctctttacctaataaaaatatattccggaagacgtgaaattaaaaatattccggtgcttgtgggtataacagaggatggtaagctgcttacacataatgaatgcgaagatatattaaatagtcctgtatatttctttgaggaacagggcgagagaagggcgtattggttaaagtcagaaaaaaacgacaatatggataggcttataaatcttgatgaatatgtaaaaaaagaagaagaaaaacttacgccaatgcagcaggaggagattaacagaatgaagcttgccgccgcgaataggaaaaatattcttcttcattctcttgacgatacagagcttgatatgaagcaggcagaaagagaaaaagaaagcgtaaagtcggacaggctgaagctgcttaaaattgaacgcaaaatatcatctttgaaaaacgagattcggaagaaaaaagaaggattgttctttgatgaaatgcggatagatgttgatttggaaaataaaataaatgaatttttaggcagagaaaaaattacagcaagagccgcaagacaatttgtgttagagataaactgattaacttggaaatgaggtttaaaatgaaaaagaagaaatacgaaataacaatacgctcatcagcagcggaatatttaacctttgtggcatcaacaggcgacagcaaagacagtattgaaatgcgatatgtggacgaaaatatttggctcactcaaaaaatgatggcaacactttatgatgtttctgtggcagctataaatcagcatataaaaagaatttataccgataacgagcttctgccggaagcaactattaagaaatacttaatagttcaacaagaaggggatagacaagtttcccgtaacgtcgatcattataatttacagatgattattgccgttggttttaaggtgaataatgacagggctgttcaattccgtaaatgggcaaattcaatcgttaaagactatacaatacaaggttgggttcttgataaagagagattgatgaacagcggttctatacttacaaaagaatattttgaccacttattggatcaaattcgcgaaatacgcatgtcggaacgtaaattctatcagaagataacggatatttatgcaaccgccttagattatgacaaaacctcaaaaactacaaaggaattttttacaaatgttcaaaataaattgcattgggctattcacaggcacaccgcagcagaaattatagtagagagagcaaatgccgaaaagccaaatatgggactgacttcgtgggaaaaatatcccgatggtaaaattcaaaaatacgatgtttcaattgcaaaaaactatttgaatttggacgagattgaaagtcttgaaagaattgttacgatgtatcttgattatgctgaatatcaagcaggacgtaatattccaatgacaatgcaggattgggtagtaagattgaatcgttttttagaatttaatgaacatgaaatccttcacgacaacggaaaagttacccacgagatagcaaaagcatttgcggaaagtgaatttgagaagtttagagtaattcaggatggtttgtatcaaagcgactttgataagtatatcgaaatagaggaagattcttttgaaaaattaaaacagaaagccaaagaaagcaagctgagacttgacgaataatttggagggatatgaaatggataaaaatattttagacggactttcaatggatttagaaaactcaaatatggagaaattaaagactgtgttcccggaatgtttttcggagggaaagcttgatatagacaagctgttgtcactgtgcggtgaatacatagataatgattttgaaaagtataaatttgagtggaagggcaaatcagagtgtttgcatcttgcacagaagcgttctacgggaacactaagaccttgccgtgaagaaagcgtaaattttgataataccaataatgtttatatagaaggcgataatcttgaggtgttaaagctgttgcaaacagcttattacaataaggtgaagatgatatatattgacccgccgtataacaccggcaatgattttgtgtaaatattatgattgaaacaattacttttaataagtacttccacataagcgacacctcctttcagctgtgagaaacagcatatggagatgacaaccgtccttcaatttcctcttacctgcttgacagtattatacaagaatatacataaaaaatcaagttaaaatagcattacggaatgtcatctaggggcattctttttttgttataatataatagattggaggaataagaatggcaaagatatacatagacccgggacataactgcagcggagcggatacaggagccgtggggtatggattgaaagaacaagatgtatctgtgcagattggagtgatactaagagaattactattggttagcggacaaactgttaagatgagccgtgatagtattaccgatacagtatcaagcagcttaaacggcagtcttgcatacagatataacagtgccaacagctggaatgcagatgtatttgtatcaatacattgcaatgcggcaaacacaaaagcgtatggctgtgagacatattattgcacaggcagcacgcagggcagggcgttagcggaatgtgtacagccgaatatggccgcggagacggaaaggtataacagaggtgttaaatctgctaactttgcggttataaaacacacaaatatgccggctatattggtagagacagcatttattgacaactatgacgataacagatttttagcaagcgaggacggaaaatataagtgcgcaacagcgatatacaaaggtatatgcgactatttggggatagaatataaattggaaagcgaggacgaattaatgagcagagaatatgaagaactaaaggcagaaaacgaccgtcagaatgacataattaaccaaatgggaacagaatttgaagaattgagaaacactgcaaaatctaaaatttatgattacgtggacgacaatatgcctgattgggctagaccgacaatacaaaagttggttgacaagggatttttaaaaggtgatgaggaaggcaagctggggcttactgaggatttaatgcgaatgtttatagtcaatgatagagctggggtatatagggaataaatgagatataacaagtattaaaatatttaattttcataattccacaccaaaatatttattaaaaaacaaaaatatgagactaatcacatatgtgtttatgagataaattgataaaatatttgtatattttatcaaagggtgtggaattatggaacctgttgacattttgaaaatgtgttttagtaatatcctgtattttaaaagaaaagaatttaatctcagtcagggaaagatggctgaaaaatgctgtatgtcattaagacaatatgcagatattgaaagcgggaagaggtttccatcttctattagcctaattaactttataataaatggcgagatagatataaataagtttgtttctgatattcaaaagttaggttatatgcctaaggacagagttacaaagtctaagaaataacacaataattatttgtaactaaataattttaaaatgaaaaaggatagtatacaagctatccttttttataatgtgaataatatgcttatatttctgactgacatttgactgacatttataatgaattttaattaattatactaaatttaaaaaagtgctgtatataataaaaacgccgcagaccacgcacctctcgtaatccacagcgtttccttatggtcggggtgacaggattcgaacctgggcatatttgtgtgttttataaccgcaaagttagcagatttaacacctctgttatacctttccgtctccgcggccatattcggctgtacacattccgctaacgccctgccctgcgtgctgcctgtgcaataatatgtctcacagccatacgcttttgtgtttgccgcattgcaatgtattgatacaaatacatctgcattccagctgttggcactgttatatctgtatgcaagactgccgtttaagctgcttgatactgtatcggtaatactatcacggctcatcttaacagtttgtccgctaaccaatagtaattctcttagtatcactccaatctgcacagatacatcttgttctttcaatccataccccacggctcctgtatccgctccgctgcagttatgtcccgggtctatgtatatctttgccattcttattcctccaatctattatattataacaaaaaaagaatgcccctagatgacattccgtaatgctattttaacttgattttttatgtatattcttgtataatactgtcaagcaggtaagaggaaattgaaggacggttgtcatctccatatgctgtttctcacagctgaaaggaggtgtcgcttatgtggaagtacttattaaaagtaattgtttcaatcataatattatttgtgattgtctccataaaagcagtgtaaccgcccctctggcaaggattgcggttacatatttaccaatatctttgacaaccgtttaacggttatctcttatctgctattattatatacttatgtaatcaatttgtcaaccgctaatttttgttttctttaagctctgccattactttatctgcctttaatgccgtctgcgaaaaactgttattcttccaccacgctacagcagacgcaccaattgtaaatactatactgacaacctggtatatatcatcatccgatatattaagcacctgcttaccgcacatagctaatacctgatttgccagtgccagcaataatactatggttcttgctattgttccagctgttacattattcatgctctttcacctcctcgctcagttcatcaagccgtttgtgcgctgacttagctgacgcttcaacagctaccattctctctattaaattattatgcttatttaccttttcttcaagttgtcctatcctatatgtagtgagcttattcgctgcaaatatccctgataatgagccaatgagcgtacctattaatgatagtaccccaactattattgtgctatccaaaaccatgtcactaacccccaacctatctcacaaatattttaatatggttatcatctatccgctcaagcacgtaaaaaccgtcttctgccgccgttgcttttgcctcatcattaggcttgcaacgaccttttgcttcacatgtgccgtcatctattaccaccagttctccgtgtgttcccatatatccccactccggacggtcttttcttggtatgtatttctgtgaagggtcatagtcttctgataaaatatatacatctccctcgcctgcaggagttataatattgccttcgttatctcttttttcttcccaggttatatgttcagtcaataaccgcccaaatacgtccttcttatatttcccgctccactggtcgtcatagttgtttccaactatacacggattgcctgatattactccgagtaagtcttttgggtctcctgaatttgcaagccgtatcttctcaccgtcaaaacatacaaataatccgcacctgtcttcattattgggatttccgtcagaccattctctaagctccgcataatcggctccggttccgttgattgacttcatcgcatacacatcaccgctgtaagccgcacgaaaggcgttggaacgggaacttaacgtcccgtttccaactataaacccgtcgccgttattatgagaataatatccggcggttggttccaaattatttttaccgcacacagtgttataaccgttgcagagcaaagaccagccgcctattgctaccgccctctcaccattcacagcattagcatagccgcctaatgacacagaacaaactccgggcaccgctccttgtcctcctatgacagcagagtaacttccttctgcgctggccccctccatcacatttatcatctttttatcgttgacatacttttttgtcttatctactaactttgtcagcgctgtcattcctaaaatctttgtcgccatctatatccctccaggtttagttaaataaggcctctacctctgccgccgtgatttcctgcaatgcgtcgttcttcatatatccgcttaagtctatagtctcgccaagagcgtcccacgctgagcctgtccacgcaaagttttgaccgttcttgtcaacaacgttccatacatctccaacggtatttcccgttgtcggaagcgaagcatatgtatccttacttcccttatacttgtatacgcttgacactttgttgtttacatatgtttctgttgctagtcctgcctttgcagccgtaatttttgaatcaacctgagccgatgtcattttcccgtctgcactcgtcttaacttcattaatcgccgcaactatagttccttttgctgttgtgttcaggtctgacaatgcaccaatatttgtttttattccattaatatcatttccctgtccctgtatcatcgaatcagctgaatcttgatgcccgtctacttcgtttatggctgccacaaggttattctttgccgttgttgtcaaggttgtcaatgttcctacatcagtctttgccgcaaaatcctttgtcgcattcgtaactgtagtagatacctgtgaacttgtctgatagccgctgtcgtttgtaagctggctgagtttggttggtatcgctgttgttaccgccttaatcttttctactaactttgttaatgcttccattcctaaaatttttgttgccatgatattacctccataattttatataatatatttattttattttttacttatttaaaataatgcgtttacttcatctgcagtgacctcaacaaattcacctgttatgataccggatgtattaaaaatcctaagcagtttaatttctacatcttcattagttatttcactccctgaatatatcacgctgttacttccgtcaggcagtaaatcattctctgcgtttaatgtaatggtcccgagatagatatttatagttgtcagtttcgtttcgtcctctatctccatatagctgtttggctttccctttgcttctttaagactgtatgttacggtcacatctgacgcgctcaattccccggataaattatccgtgttgagtatgtatgaagcataacagtattttttctcttctccggttttgtcctttacccctgaaatttctaagatttgagacggcagggtaaaagttccgtatgtgtcatctgtaattgttataggcgatatattatatcccactatccaattgccgttttgccatatattaaattcttctgattttgataacgcttctcccatcactgccttactggagttattccctttatccatgctcaattcgttaatagcatctacaatgcttgattgattatttgtatataatctctccaactgacccacatctttaagataatatctatcgtctgtagaatcatatctaactatcttatattttctaaattgcagactttcactttcgctgttactgccttcgcatatttgcacagcattttgagccaaactttccgcaacatctccaattgccacagaatcaagtcctgaagctatagacccatgtccaatcgctacactgtcatttgtcccctctgctcctgcgccaattgctattccatattctccggtggagcctataccgcttccaattgatatactgccgacttctccggcttccgctcctccggctataaatcccccgtttgtaaccttatccgccttttgggataagttgtcagtgacacttgtcatattttgattgacttcattcacagcttcaaccacgttttctttagtcgcggtagtcaaattctgcgtatttcctattagatttattgtgtcctcgtctgtgtcaaccagtgtgtttattgcttctgctatactggttacattaaggttaatatcttctatgctcccaatctcacttttatctgcctttaaatttatttggttaataacctcagttcttaatgcagtaacatcagatattttcgccaatattatccattcggtgaactgcggagcggaactttccaagcctgaaacatttctataatacgttgtccactcgccattaacattttggtgaagcacctgcaagagatttgtaaaaactggatatacctctatcgcaaaccaatatgtgccgccgccccctaatgttccgtcaatagcgcctcccccataataaaagcccggtgttaatatttcatcgggcaatttcgctgtcttcttaaacagagacatatctattttatttattttatccttaactgtgctgtcgtcgtagtctatatcctccgctctgtgtctgtctgccgttccgtctatatggctgttgtaccaccccatcagatttgacagattatctcttataaccgtccaccagtagcgcaatttcgtttgaccgttatagttttcgtttatactatgctttgccattttatcaccctttctttttcgcaacaaaaaaacaccctattgggtgtcttgacaaatattatttgtgtgatataatatagccaatggaacaactgtaggggtacggttattccgctgcaatttagagttgagggaataccgtccgctatgggcggttatttctttttaaatttaaatccacacactccatgtggagtgcgaccatgtacataatacttctaaccttagtagtcattaatttatttaaatccacacacccctgtagggtgcgacataaccgccaatcgtccattggctttttttattatatcaaatgtgcctttttatgtcaattttttacctcctttcatattttattatgtgtgtttagtctgagcagatgggataatctgtcttatctcgctttatctcaacttcacccggtgttacatttttcaacgcctgtgatacaagttctaataccgtatgtgttctgccgtatggtatttttgcttccaaaattgcgtcaaaaacttctctgcaatatggatataagccctccggtatctcatcatcacaaacgaacggaacacgctcatttttttgtaacataattatcatcctttctattttaatatatataaaaagaacgccctttcggacgctcttgtttttccatccacgcaccccgtaaggggtgcgactggaactggacagcagtatttgacggcggcaaagtcatttaaatccacgcaccccatgtggggtgcgacgttgtgaacttatagctcataaaatgacaggtaaaatttaaatccacacaccccttacggggtgcgactcaaagcaactgcatatttcccgtcgtccgatacatttaaatccacgcaccccttgtggggtgcgacagcaaaaatatataagagttatatacttttattcctataattgttatattgttacataatacttaaatgtttaatataaaatgtgtttataagaatgtttcttattatatatttttgtaaaaaagtggtgcgaacctcccagggaaatcatgtgagcatatgattcgcaccactatattatatcattgattaattattatgtaaagtcttatgttagttgtttttgtgtctctctaagtaattgtgtcacatcactaacacaatcagacaatatacggtacaatgatgtataccttgtgtgctcatgcacgattgatgacatatcagttggcttttcacaatcatataattcatttaaatccacgcaccctacacgggtgcgacattattaagcatacttttccgatagattgtattttattcttttcaaatcgttgcaacacactaatatactaactccaagtctgtctattacttttaccgctgcttgatattcgtcctctgcgacatacatatctacctgtgccatcaactctgtcagagtagttgccttacgccttatattgttaattaatttctgcgcatcattattatcgggtatatccacatataatttctttgaccattttaactcattatttggcttaagaattttaaaacaatcctgtatcggtacaccctgtatcatctgcgcaagtttttcgactcctcgtctgttaataacgcacaaactggaaatcattctgtcaattgatgggttgtttcttttaaattttttaagcgcttcgccttccaacaagtaataatctctattgcgttggagccgtcttacataataacgtatcgtatttgcgtttaatcctgtcagtcgtgctatgtcctgtattgttataaccggttctccattatagtattttggtgtaatttcttctgccttagattgctgttgtttaaaatatgtattcactagctgcctttgcacttcccacgctaaatcatcagtaaatgattttaccaacattaaataccctgattctgttactacaatgccacccctagggctgtttattccaaatgtccgactttcggacatttgcagtttatagtagtcttcgccttcaataaaatgccctttgttgtcattaaatctttttcttgctgttccttgtggtctattgtgtacagtgtctatatccctcaaagttactacccttttcccttggtattctttcaacgataattgatgattattaaccgtaattgcattttgcataaaaattcctcctaaaatttctattgaaattccagaagaaatctgatataatagatttatcagaaattcttctggtgcttgaaacagacttgtgtcttttgtgggagacagtctgtttcatttttttgtttccgaaagtaacatttgaatacctcgtcgtattgcttcgccttttgttatgctgtttttattgcaataattttgcaactttgtttccgtttgttcatcaagacgaatactataacgaataactttaggcttatctgctttcggtctgcctgttcttggtgacattacttcacctcactttctgtcacacctttattatactttatgcgtgacagaaagtcaagagtttttttaaatttttatatctattatataaattttttaatttggaccccattcggaaacagaaatatctggtatagtaatattaccacccatagttgattcatatgttaataatccatttgattttcccataattgttatatagtcgttttctaaaattctcatattagccgttttagctttaggcactctgcaaaaaataatactgtcatagtctcctccaatagcaagacgtaactgtgtttctgaggttccctcaataacttgtattactttaccataaaatttcacctttttacctatgtaatcatttggagtacgtgcaagctgattatatgtaatacctgtttcatagctgtttaattctgcttctttggctgctttttctttagctgccttttcctctgccgctttttgagcagctacaggatcaactgttggcgccggcgtaggcttagcggttggaacaggtttaggagttgcagttgatacagattgacttgccgccaatttttgttctgcgttattgtcagaaacagaaacagctataattatagttaatacgacaataagcaaacatattgacgatatcataattattttatcaatattatttttcactatatctatcagcgaatttgttttcggttcatttcctgttttaatagaatatccacaactatcacatttgtttttatccccgacataaaaaccacaattaggacacttttttatagattgattttcctctccctcctttaactcaccaccgcattcattacaaaactttgcgctctccggattttcagttccgcatttactgcatttcatttttcttcatcccctttattctatatttttctacataataccataattttcttaatttgtaaaggaattttatgacgtgttctctaaattcacatttaatacattcagtaaatcattaattcatattataaaagacaccctgcattgggtgtctttatggttaattatattttaatagcggctcaatttcgtctacgtatgtgtcgtaggggatacaacgccgcaaattaataaaaaccatataccaagttttaccgtcaatttctaattcaagtttatcgttcatgattaattcatcaacatttgtctttaatcctttattttctgctaaatcaattatatattgtgcggttatataataaatttcattatcaagtattgtgtaattttttaaatctactggtggtgtatatttactcttcatagtatctttatcaaccctttctccaatataagctgtattatcagtttcgtcatactctactgtttcgccaagtgcttcgcttactgcccgtaaaggtaaatatgtaatatcattatataagaaattatccgctgtaacagtttcaccattaacaactacatttatatcgtttttcagcacgctgatattatcccaaacaccgtttgctaaacttccaattgatagtgtacaaatcgaaccaattaataagccgcaaataaattttttcataattaacaccctttcgctatatattattaacaatatatcatacaaaataaatatatgtcaatacctacatacctttcaacgcatttatttgctcttgtaatgattgtatatcatcttttgttgctatttcagtgttcttataataccacgttccattcatagaaactttattcgaaagtgttgtcaataattttgagttattacaataaaatgttactccgtctatatcattatataatttaaatatttcaacaccattataataagtcgctaaatcgctatgtctaccgtcaggattactaactaatccgtgtaactgattatcactgttataactctgtattccgttgccgtctataacggttcgtgtctgtccattttcacccgtcataaacacaccgcatatagttaaattaccgttgtcgtccatatatagcgattttttgccgctttcgtcaaaaagctcaaatacatatttacctaattgtggatttaagcccgattgatagcgcagtgttccgtttccgtcatacatttgtatcaaattatcctctattttaagttttccattctctgacattatggtgattaagttagtgtatagatatgtcgttgcccaatcgcttccgtcgccgtgtccaaatactcctatccagttccagccgtcgtcacgacttttgtcagcaactccaatcttgattttaccgtctattattgcaacagcgtacattccgttaggggatacgaacattgctcccgtttcatactgcgctattttttggtattctccgttattttcgactgttacatcagtgttctttttcataaattcaagtgtgtttgtcttatattcatttctttcgttctgcgccagtctcaaatactggtgagccgtgaacataccgctgaatgcttctatcatatttattggcggaactcctacgataatagaatttttgtgaggctcatacgggtattttttaaccgttataactctttgattagatttgattccgttgtttatgtcgtttaccgttactatgtcaccaaggtttatttctcccggcaaatccaatacttttacatttaccgcatactttggcacgtctattctttccgggttgtcttctctaaattgtgtctgtgctgccagcaacaaatcttcctggtctgttacttcatcaaagttgcagaatccctcatattctcccaatgtatcatagttaggacttaaaatgtactgcttgtctccttcaagcggcatgtcgtccttaccgtatgggtacagctttgttactaatgtataagttgatattttaggctttatttcacaaccattgtatctagggtcaatgacaaaatctttcttgcttcccagctgtcttacaagacctattttatcattgtcaatatatacttcgctgtgcactctatatttttttaatgtttccataagcctgttgagacacgctataggagtagtctttgacatttcgaaaaagtctattttgtccgtgacaggttcaagccccagtgcttcaatctcttcttttttcaaaactgttacatacggcgttgttgcaaaaatgctctccacaatctcatttgccggggtgtttatcatatctcctatgtattgcacatgcgttctgcacgcgtcctgcagaagcgttgacgctgatattgtgcagtcgtctatatctttaattctgaatatacgtccgtcgtacccgactttgcggtcaaaatcaatcaatccccattttttatcacctttaggcagaataaatgtcaattcataatctccgtttattgactgttcaatacatacatcttttgcattctctaaaaatcccagtctgtctgattcatactctgttgcgtctttgtcatacactgcaataaatttcatttaaaaaccatctccatataataatttaggtacatattctaatataatctgaccgtttccgctcagacaatttatatttattttatttatttcaggtttcagctcaaaaaaatcacctgaaaagccactcggcagaaccgcattcgcacagtctattgttacaggatttctaaaagccgccgtactgcttattgtgctgttgttaacagtcaggctgaatccatttgtttcagtcgttggcgttataacaacaacgggtctgacaggagctgagccgaaataatctaattcaagtcctgttgctcctgcgccgtatattatctcgttttcatcgcccaatcctaagggtatatcgctgtccaatgaatggttgctgtccagcggcacccctttactgtcatgtatccagtcgttaaatggtctgcacctgaattgtattttggtatgtccgttcttgtataattctattgttaaatcgtctaaatcaacaggctttgctatccattttactgttggcatgtcgtcaaatataagtttcccgtatcctccggctaaccagtttgcgacttttgttacgtttttttggagttcaacagtatcgtgagatactaaataaaagtcaagttccaaaactttatcgtcataatataaccgccctcctgtctcggagcaatcaacatttccgtccctatatggcacctcctcatcaatctgccttacaggcgcgattatcggtcttccaacggtctttacgattacgcctatatcattgctgtgtttacccctaaatgttattccatgtctcatttttagccccctacagcggttaccgttttatccagcactttattttgatagagtattccgtccgtgccgtcatttatattactggtaatattctgtgttactgtaatactcggtttgatttccttaatggcagcttctattctgctcgtcatattatccatattggaatttatactctgttccagcggctcaacaaccgaggcaacttttaaatttgcttcctttgtctgctgtaatatatttgccttttcgtcttcaagcgccttatattcagcttccatttgctttattatggcgttgttttcctgctctatctgataacgctgttcgtctcgctctatctctttgagtttgtctaatgcttcctgatatttttgttttccctctattgttacagcattcttatatttctcaatgtctgacagggtttcagccttatcttctgcccggtcttccacttcccatgattcttctagagcactgagcttgtcgtcgagcaagtccttgacctcgtccatacgttccttagccatatccagcatttcgtcgtatctgtcctctgtggctttatataattcaagccgcatttcgtcagcctgacggcgagcatattgctgtttagtcggatccaggctctcatcttgcgaccattgtgtatatttatctattttgcgctggtaaaaatcaagcttattttctccaatttcttcccagccgtatacccccgcttgcttctcagtccagtctgcgtcgtcttcccattcgctcaattcgtctctgaccgcgtcatacattttcttatccagctctgcctctaccttaattctgactaccttttcttcatcggtcagttctccgagccctgcaaaatattcctctacttcttttctctgtctattaaccgccgctatcgtgtcggcagccgacatattgttatactctttttcattatctatccagtcgtccgaataatccaaataaccgtctaaaaattgctctgtgtaatcaagccttgtgtcaaaataatcttcccaggtgattaatccgtcctttgccgcttgaacattacgctggtttaccgtctgccaaacagcgcccatgcttgtacccatttcgccccagtcgtttatactggcgtgtaaatcaatatacgccttagaggcagcatttgcgtcgtcaataagctgctggctgtacttatgtaattttagtgttgcgtctttccattcctgcgtgtcgggtgcgaaattttcatcacggtatacggcgaggttattatagtattcttcctgagatgtccagcccatatcaagagcaaattccattgattccaggttttggctccacatctctcttgtataattaactatttcttcctcaatctcttttataacctcagcgtcagaagcaaatttctgtttcatttggtcgagccattcaagctcttcccatgccggaattatgttgtatgaagttttgcgtatatgttccctgtcagacttagcgttttcccagtcctcgttgttcttgccgctcgcatagcgtggaattcccgcgcccgacattatttgtcttgtttgctttgcagtataaattttatcgtgtaattttaaatctattggaacgtttttgccttcaaaaatatatccaacaccatcgcgtacaacaagttccctagggtctgacactcctttttcatcattgataataccaaatccgggtttggcgtccattgtccctttagctgttattccgtttgctaaagcatttggactaggcaacccccctcttactactgtatttattgttattgttttagatgatggtattgacctaattgccgaagccacttgattcgctactggacttgcgttatcgcttgctgtaattgaagtgtgatgtgactgcggaattccattaacagaaccagttgcattatttgcaggcgcgctcgctccatcacttgctgtaatatttgtattatgtgaatcagggatattgttcactgcctctgttgcattattagccggttcactagctccatcgtttgcaataatttgtactgttccggtcttcccatctatatcagcaattttattgccaacctcatcaaaaatttcatagttaccgtcagcagttacttccacccttgccgcgcgtccgtccaaatctccgaccgcactgtttatttgttcaacagtcggtgtcgctccgtctgctacctctaatctgacctgtcctgtttttccgtctatctcagctattttaatacctgcttgatttaacacgtcatagtttccctctgcattaactgagacagtagcggtcttgccgtcaatttcagaaattttatttccggctttgtccaaaacctcataattctctgttttggtattaagttttatatcaacatgctttccatttatctcttgtaacttaccgtcaacttctgtaatcgttgatatatctccatccacactaatttgtatagattgattatcggataactcgcccatacttctagctaattctgttgatttttcagaaattaaatcaagttttccagcttctgctgcgccttgtatatctttaaaaccattttttatcagggtcgcgccgactgctgtttcttttgcactggctccaaacttttgactattagatatatagtcactaacaacattattaagcgtttcgccgcccttttgccaagctgtatctaaattttctattccattttgagctaaagcggtcttttgcgcatattcactaacgtcaagacctgcactttttacagcggttcctacatcttcaatattttgcgaaacttcctcatagtttccgctttctaaatttgccttgagcatagaaacagaatcatctgcaagttgggtagctgcttcataatatttagacattctgttttgtctgtcggtttcagcttgacctgctatttccgtttctttagtcagcctgtcatattcattgctaagattgtcaacttgacttgtaatatcctttaatttatctgttttcggcgttagtccatgatataggtcggatatgtcaccgcgagaaaacacctcgtcaataccttgtttaagttctccaaatgatttattatattcatcttgacttattgttccactatctaaactatcgtttagcccctgccattcatctctatacttgcgtaaatcattttttgcgtttaaaatatttttttctttttctaaggctcttgtatacccggcttctgtatggtctctgtctgtcacatcatcttgatattgctgagctccatttcctacactatcttttaaatcattaattgcctctttagctttaagtctttcatattctgtaagtttttttgttacttcatcaagttgtccgtcatcaacatttatttttaaattgtactcgtcagctagtatttttttaatttcctgtaatcgtgtttttgctgattcaatttcttctttacttgtatcctctgcatttatttttatttctaactgttcaacttcctttgataattcactaagattcttatatgaattaatagctttttcagcatttgtaactttttcgtctattcctatagtgtaatctcgtgcctcaacaacacgttttctgacgttttctaatcctacatatgttgcagttaagataccaatactccctgctaccgcaagggctacaggtcccataccagctaatgctggtgccgcaacttttattttccccaaagcttcaacaaaatttcctatacctttagttgtcccggctacaacttttgcgcctgctcctagaccaataagcccggtgccgatattaactagattctttttgccctcatcgctcatattagcaatgtcttgtgcaaaatcttttattccgccggatacattcttgattgttggtaaaaatgtttccccgataccgcgtgcggcttcaaccaagttatttttagtaacttgtatttggcttgccgttgtctctgctttagcattaaattccttttggagcgctgttccatcttcccatgcagtgtttgaatgttctaaagctttagtcaacaattttatacccgactctcctgcaagtttctgcaatgcttgaaggtctcttatattattgaatcctaaattgcttaatgtagatatttggtcgtcggttttagataatccttttagaaagtcctggaacgctccgcttgcgtctgtgttccattgttctttgaattcttctgaactctttccgcttagctcggcgaacgtttctaaatcttctccgccctctgacacagactggtgcatttgcatccatatacgggatactgcactgccgcctgacgcggcttctgctcctaatgatgataatgctgtcgaatacgccagcacgtcctgcgccgatataccaacggttgaccctgtagcccccatatacatagccatatcagctatttcagcctcagttgtggcaaagttgttacctaaatcaactattgacgagcctagatttcctacctggtcttgtgaaacaccagccacattcataaatctagcaagagtttttgcgccttgttctcctgccaaattagtcgcagttcccatttgcgccatagtttcggtaaaacctacaatattttccgtctttataccaagctggccgccagcagccgcaagctctgtcaactgtgccgtcgtttgcggtatggcgtttctgccgtctattcctgttgttgataaatctataataccttgttttactttctcaagctgcggctctgttccgtctacggtctttttaacatttgcaaaattatcctcaaaatctatagcaaatttggcggaagctacacccccggcggcaagagcaacacttgctaactgtataggcttagttattgtgttaatgctctgtcctgctttttgccaactttccccaacatcttgtaaatttaaagccttttccatgttagcaatagctttttggttttgggctaaactttcatactgtttgcttgcgtttgaaacagctgactttgcagaattatacgccgcgctttctctgtttaatgcgctttcattgttcaggattgattttgatacttcatcgtgctgtttctgcaatcctttatattcattctgtgtccactgtatagccttaacattatccttatacgcctgactgtttttattcagccctgcattggcagattctaaagcctgaatctcagcttttttggaagtcataagactgcctatagccgatttctgaccgtttagcccttttatattttcgttcagctgtttagtattttgcttatacgctttttccgtttcagccaatatacttcgcttttgctttaggctttcagccgactttgcgactatcttatcatatccgcccatttgccgggtctgctccgcaatgcttttcacgcctttctgtgacatagcattcataccggataattccgactgcacctttgatatagtagaacttaatgacgatgcgtcgcctgtaaattttacagttaattcccctaaatttccgctcatataatcccgcctttctttttctgcaacaaaaaagcgcccctaaagggtgcgctaagttattaaaattcgtaatgcgtccacatgcttataatttttactgttttcgcgtcttcaaccacttcatacacaagtctatgctttatatttattcttcttgaatacgctccgctaagttcgcctttcagcttctcatacggcggcggattctgatatgggttattccttattatatctataagcttctttgcgttgtcagataatccggcttcttttaattttggtatatctttcaaaacctttttagtataaacaatgctatacattaccattccaccttgtcttcaggcacgcactcacttatcgaagtatttagcccatcttttattttatctgcaagtcccggaaccgaagataaatagagagtttccattaaactgttatagtcattttcgctaattattaccgcattgccgttttttgtgttaacattaataacatcattataatttactgcctggtcaatgtattcaaataaattctttcttaaatttgttatatttgtgttcgtcataaaaacacctccaaatatattatatgtacattatactgtacgtatacaaatttgtcaagaaaatattatttcacaaagcaaaaaacactgtttaaaatgctttttgctttgtgcagtccgtgaactgcacaatatttttataacccattcatccagccaagactgggaggtaagtttgtgacagagttttcctcctcgtcttcgtttagagaaattaacatttccattaattttaccggattttgtcttgccagctcgtcgggcagtatcccttttgtcttatacattactgcatatatatctttaagattaaaagtttcgtcactgtccgactttactggttttttatcagttcgtttacttcgcttatagtgttcaaatatatgtcaagtaatttcctgcataacatatctttttccgcaatagacattgtttcaatgtattctttattagccgctgtgcctctgaacatacgtataagaacatcataacacagcttgcaagcgcctgaatatccccttaaatgcttgtcctgcatatctgcgtaatcctcaaagtcaaacggtcttgattgcacttctttgccgttaatctttatagttaatatattttctatgtcttttgccattagattaagccccctgttccggtgctgccgacggataccagttagggtctttgaaccagttttctatagcctgtgcttctgtcacgccgtcaggaagattgtctgtgtcaatatagtaatatcccttaccgtcagaatcacggaacacagctgaaaatgtggctttggcggtctgatgttcaggcgcgccctcagaagctttggttttgcctccaatatttgaggcaaatccatatttgcccttatagtatctaaccaaacgttttacaccgttagatttttcaattatccacgctactgcaaaatattcagcctttgccgctgtgtctttgttgaactcaacgccgttgtctacaagctccgcacctctccacatagcgtcaacctcgggcggtatatctgcattggtgatttcatgacccattttttcaacatacgaatccacctcatatgctccgttgtccgcgtcaaatgttgaggtagaccctgaatctgtaggagcgatttcaaccgttccgggcaaggtcaccgcctcgccgtatgtagtcttccctgtcgctatatcatcagccgttatggggaaaaaggtataatttgatacaccaattttcgaatgtggtttctttatttcttttactgccataattaatgacctcctaaaattaatttattgctttttgtacttcgtttgttaatatttcaaccgcttcatctttcccggcttcaaaccccggttccatgtacggctgtggtctctgacccctggtcgtgtgccattgtcctttgctgtcctgatacctccacggcgtttgacgtcctccggcgtaaatacctgtacccatttcaacgtatataccataatcagccgtgggtcctatctcagatgtatattttcctccaccgcctgttgtttcttctacaatgctgtttctcagttctcctgtatcaacaggacactcagctttacactgggcttgtatagctttgccgccctttgccaccccgttttgtacagcgccgtcaagtttagatgatatattttctaagttgtccaatatattatcaagcccatcaatttcaatattgattcccattgtcacccctcattttaaaaaaatacctcttttttatatctctgcgacaaatgatataattcatcagggctttgccggggcacatcgcaatcgtatgtccttgtccagccgtccgactgcattatctcattgacttttactcctatattggataactgcacgggcgaattactccaaatatccacagcaaacttgcttacttgtgactgctcggcgttatcggcgtgaaagccctcgtcagttgtcacttttctaaacgtaataacaggcacggcgttaaaatgaaactccgtgccatatttaaccgttattcctgtactttcgagcagttttttcacccgtggaattaaatcaatcaataaaacccacccccgtatatatcacttgcgccgttctctcccgtgttaacgttcacgctctcatcttttacggctgttggcagcttgtttaaaagagccattgtgtaatcgtcccaatgttcggaatactttactgtatagcttatattttcacctttcaaagcgacccttgcgccttcttcaagaaatgtacaaggctcgcagtaaatacgctttacagtctcaatttcaagtccgtattcttcctgtgctagacctccgctgtatggttgaatatctgctgttatttcagctttaagttcagcgccgctgtatacctcaatcgtttttttcaggttcatcaaaatcactcggaaccctccctttacgattaataaacggctttaatctctcgcggtaattattgagaaaatgactgtcgttagccgtactgtcctcatagcttttgcttacagagccctgtgtttccgacttcacaaccttgtctgctttttcctgcccatagcttgcgcgcctatatcggtcggcggtcataaccggcaaaaggctttcaagctcttgcggaaaatctgatattctgcaatagtttaaaatcagatttatgttatcctcaattaaaaaggacagcaggttatccctgcagtccccctctatccctagaagcatttttgcggtttctagcgcgttcgctttgtttaacattggttctcacctccgccttcggcttatcgtcagatacggcttttcttgctttcctgtgtctgcttaataacattcccatagggtattactcctttgcgctaatcttgatggccttggcgtcgtccgcgatgtgcgttgtatagtgcttgtcggctgtgataaccgtggttttattaacaatatctctgtcattttcaatctcggtatcgcgctttaggtaaatcgcaagcgcaccgggcttaacgatatagttcgtataagcgccgttctccgccttaatcttgttggaaagcacaacttgacagccgtgtatcatgccgaccgtgcccttaattataatatccgcgccgatgtcggtcgctttaatccagtcctcggattttctaagctccgccagctgtgccggagcgataagcagaaccttttcaccgtctatgtcctctccgaatttaacgagtgcgtccgctataaagtttgaagtcagcgttgccgtgccatctccgactgtcatagcggatatgatattatcaagcacagcaagcacatcattgtcaagcttgtttgctattgacaacccaagctgatttaccgcctcgcccatagggtcgccatagccgcttagaacggactcgtccgtaagctcaacgcccttgcctgcctttttaacgcttaccttggtggtcgatgtcgccattttctcaatcggaatagcctcgccctcgcccacgtcctccgcgtcacctatgtacgcatactttggaagcgtgacggtatcgcccggctttccctgcaatgttctgtcaatggtcgcaagcggggcaaacttcatagctgcctcaagctttgccgataccataggcgccataacctcgggatttaccatgttttcaagcttcgttgttcctgttgccattattgattacctcctgttaatttttcataagtttctttgtcctcgttatacagcttgacgcgctctgcataactcattttgttaaaagcctcttgcgttattgcagcggctttgtctgtccccgcctttgggacagttcctttcagcttatcgacaaccgcagcttgcacctcttcgttaaacgccttttcaaacgcgtctatattcgcctttgtggtttcggcgttgtcctgcgccaaaaatgaagcgaattgaggcgaaagccctttgtccataagtgatttacccgtttcaaattcaagcttttcacgctcatatttcgcgcgttctttctcgaatttctcctgctccttttgccgctcggcttccgctcgttcgtccgcgttcagcttggcaaggcgttcgctttcgcttattgcttccgacaaccttgtttcaagctctgcgtcccacttcttgcgcgccgcctttaacgcttcatcaattttggattgaacgtcatcagtgccgccagtgttgacagccgtccctgcggccggttctttaggttcggtcggcgttgccaggtctgcaacattttgccctgtttggggcgttgccatagcgccgcctgtctgttttgtattttctgccatttaaaatcctcctttcaattttgggtataaaaaaagagcgtctccgctcatcatctttatttattttaattaatttgttgggtctcttgacctcatgtcatcacctcatttttggtataataaaagcgccccaaaggacgcttttaagttaagctactctcaaataagctcaaataaactaaacattgagagttgtttgataatatatctcatcatataaccattgaagctcacaacccaaatcagtcaaataatcctgattgaccataccatatactattatagcttcatcagccgccgactgaaattctcctatatcattactgttaatctttatattaaatttctcatcatcaaattctaagtttccgccttcataacattctataacatacttttttattaagtcatattgttttttattaaatttatataacatgctaatttcaccttatttcgctatgtggatttgtttgtataagatttcccgttctttggtttattgaaacctcacatttatcagaaacatacttggtactacatttctttttccttacccttccatgtagcaatgcctcttttatatccttaatttcaacgccgtttctagttctgcctgttattgggtctttattggttccaaacactcgttcaataaaatgcttgctttgtgattttattttaattccgtcaactgttgtaagtcctatcaattcgtcggatattatctgcttatactttttataatcttcaaacgatgtaaatgctgaaatcatatttgtgcttctcgacttataatagtctttcaacgattcccataacttattatcattatacttcaaatcctgaaacaatgcaaacgttttcggcacattcttctttcccaacacttcaacatactttgcatactgctttttatcacctgacaggtttttatactgtctcacgtgcaggtcaaacgctaacctttgctcaggattaaggctctcaatccattcattgtaactcataccctttattttatagcccttgcctgtcagagggtcgcgcgcccagcgtcttgcatagtctgtcggcattgttgttgtacatctgcaatgcgggtgcataggcggataatttacgccacctaccgcctcactgactttaaatatcttattatcaagcggcgaacagctttcacacgtcctctcatcaagcgttgcaagatatttgtattgttctattcctaattcttcataagccctcaattcagccatgttcatgaaataactgacctgcgtattaaccagcctctgcgcgttatactttgatgtttccattatctcagcaagccgggcagccatttgcgtatatcccgcatggctcattatcccttctgtaattatcttctgcgactgttcagcgacctttgccgtgttattccacactctatcgctaaattgttcgccatgccacttactcccaagcatttcattaactgcgcgcttaggtataagagaaaagtatacacctacattacagccttttgctatgtcgtgaacggttctgtaatagctttcttctataaccgtattgtataaagtcttagttttctctatctccgttagtgccttttctttgaaataagcatatacattaagcttaaccgcttctaaacggctaattcttgccccgtatgcctgcgcgtgtatcttgcgcataagttcaagccgctgttttggatcttccgtgtcttttaatatttcagacagcctatctgctatttggttctgcgccgctttattaataagctgttcggcttcctcggctgtgatttgtacaccatttttgtatgtgttgaatatcttttttatttctttgtcgatatcttttatgatactgtcatacatacgcctaagctcttgtattgtgtatgctccgcggttgtgtgcatcaagttcgcgcattagcgcaactctcagccaataatcagcacttctcatcagttaaatcttcaagcgctgtataatccgcgcccgtgctctttctgtaaagttcctcgcgctttatctcgcgctctacgcggctttcctcctgcttttccacaagctccatttcttccgctgaatcggacacaaaatcaagctgctcaagcagtgtttcatcagatacaagaccgcgcagataattaatcgtctgtgccagctccaaattattctcaggaagatttcgattgaagacaaagtcaacatctcccgaacttactacactcatacggcttagtaaagataaatagtggacatataggtcaaatctttctttaagtccaagaactaaaaaccgttccttattcttaacatgctgttcaaaccccaaaagcttgtatcttatagcaacgccggaaaggttattgccgaaattcacgtctgtgaggtcgggcgttaatgaaaatttatgtaaatcgtccttgatgttattcctcagtatctctacatcagtctcgtttagaaccttttgtaaatattttgcttccgcgtccggcgtgaaagacatcattattttttcagtcaataattctttggctttttcgctgtcaacctctacgtttttaaggaacaatatagcgtctacaaactgctccttatcattaacgcggtcactcatcaacgtgttgtatgcgtctataagaccgataagctgttcaaaatcgccctgcttgtcttcattgttgatatactcaatcatcggcaccctgccaaatgaatgcgccgtcctctctatttcttcataaacgctccctccccctgtgcttcggtattttataacctcgttttctgtataaacattagcgactttacccacttccagaccgtctatatctgttatcgtgtagtaatgcacaccgaacagttttctttgctctacagtatcatcataaacaataaacgcctgccgcggttcaagcacagcagacttcggtttggaatcttcgttcgcataaaccaactcatatgaatgtccgtaaatagacatatcccgtacaatccggctgtctgtattttgtatctcgctttcaaaatatgcgttctttaacggttcgatatcaataccgtctgccgcactgtacgcaataggcgcgccgagcaaataaccttgtgtcatatcaactatgtacttcgcatggttacataccgttttgttgttcggcaagcctttgcctttaggtcttcgataaagcacatcatgttttcccaaataataatctttaagcttgataagccgtgccgtatcttcagcacgtttattaatcagctttcccaatattcttccgtcaacctcttttaccgtctcagcgtcaactatcatatacccagctccttcctgcttcttatctcaatacctctgttactcatatcatcttccagcgcatacctaactgcgtcaattgtgtggttatccttgtcagggtaagaagctttaaactcacctctgctgtcacgttcaagctcgtagttataaaactcgttggcagcatgcggacaccgcacagggtcgataattattacttcaagcgactgcaggaacttaataccatactcaatactatcgggccctttctttgctccgcgtactttaaggccatatcctcttaactccgctatgcttttaggttccgcgctgtcgcagacaatgtaaccgtcatacacctcgcacccttggatcaactccgccgccgcacgatttgacaagccgactttgtatatttcatccatgaggtacagccgcttccgtgtcttgtcatagtggcagacgagatacgcaaacgggtcaaccgcatacccaaagtcaattccccgcctgatccggtcaaaaaccgcaatctcttcttcgcttatctcgcgaacatcaaggtttgtaaacacctcgccgcccgttccggtaacctctcccaaatactcgtggttataattactcggtttcgtcttctttaaatgctccgcctccaaaataaactgttcgccgagccactgaggaggaacgcttaaatatgtgctgtggtgtatcactctgtcgcttcgcgttgtcaatacctcttcatttacccaattccgttgactttgcggagggttgtaagagtaaaatacattatacatttcacctccgcgcataagtgactgattaatcgtacgtatctcttccatgcctccaaattcgtccacttcctcataccaaatataacgaatatatcctctgtgcaccttggtagatttcagtttcttgggcttatctgctcccctgaataatatccgctgccctgtcggaagatatatcagttcaagcggcgacagcttgaattgccaaaggtgtgatactccgagtttttctatcgcccacacaagctgttcatatacactgtctttaagataaagtcccaccttgcgaactacaacggcattagcactcggattactcattataccaagcacaatttccacgctgataaaagaagattttgtgcttcctctgccgccctttagccagtagtgtgtatgcccgcctcgcttaatatcatggtgaagagcataaaaagaaggcgcgataaggtctgtcaaactaaccactatcatcaccctttggaatattgtctaaaatctgaacctgcgctattccatcaacctgcgttcgttctgtaaacagtgtgtaatacttaccaagcaactctgccgcttttaaacgttctttttcatcaggagatttttcaatgtgcttcgtcttcgaaaagccatctccccgtccctcaacaacaagcacctccgctttacttttaccccgcattactgacgtgagatactctacaacctcctgcgcatctgctgtcttttcgttgtgcagcttctcaatttgctcactaatatatgctttaatcttagtatttcttagcagtttagaagcatttacagccgccgaatcattattttttacattgggataagcgttcttatatgctcgagtcccattcaaatctatcaaatattcatcacagaaacgtttctgtttttcagtcaaatatctcacctccaaatcacatcacagccgcccgcccctcagcaaatttatgatgtacaattcccacaagacctaaaactaaaagaaccgccccaaaaaggaaaacggctcttaaacaaaaaatatataaaaggagaaattactttgcatacctttcataatacaattataacatgtgattttcgtatttttcgtacttttttaaaaaattattatgtttttttctcggaacctgttcatcaccattgcctactttaaaagcaatcttttggaatgtccacccctcaatatatctgtatctgaaaattcgccttgtttcgctgtcagcaatgttgttaataaattcattcaatgcgtgatattcggcttttaataaccccaactctttttttaacatatcacgtgtgtggtcgcactctcctgtttccactttcatgttatgttttatgtacgggaattccctgtctgacccctgcacaatgtcagaactttcaagcatttgtatctgttcggccaattcttcaatttctgcttttatacttttgtactgccttaatctttcagctgtcataagatttatcacatccagtttgataataattctttgtctgttaaattacttttttatccatatagtttcagtccttttccatagcgcacaaaaacgcaatattgcaagccaaatgccacaaatgcggcagtccgctttcttcatctgcacccaaagggtcatttatgtatgacacaaagtgtctgaaagccgcgtctctgtacctttgcggttcaacatctttccagctgtcactatctccatacttttttgctccatactctcttaccatggcaaccgctgtaattatttctgtcgggcacaaggtaagtttcggctttccttcgtcatatttcatcttgtccctccttgttataaatttatttctcaataagttctacatcacttagttgcacatgaataacacaatttgcgttttcgtcatatagttctccgtcatattcgattctatcttcatgaatatttttaaaacatctactagcataaaagacatagtttttatttttataacgaactatactttgttgcataattgcttgtttaacttgttttaactccatcttacaaatcctctatcctgatatatattccgggcttttcagcccaaaatttttccacaatttcacttgccaccaaattatcatctgcccaataccccaactttgtcattacatccttgagtaacttctgtaaattgtccgtatccggcttagttattttatactcaccgtctctgtgattttttctcgggaaacaccattttacaataagccgaactccaccaatatatttttttactggaacaaatctagctaaatgtgacataagttttaagcgggcgtcttttaaattagacggctcataaaaaaccggtttaccttttatcacactgactttcttttcttgatgagtaacagttggtggaataattgcaacaaaaaattcagttgtcataatcaacaccactccaacatcctgattcagcgtcatattttatcgcttcggaattttttatattgttccagatataatttaaaatttcaggttgcattataagccatttaataacttcactattttgtattttaaattctttgcccggaattgaatgtctcagttcaggcattcgtttaactgcatctaacaatttgcttctttgtgttctcatattttttgttcacccctcagtttttgttttactcttgaaaaaattttttgtcagtgacagggggaggcgttgttgtgcgtgagcttcgcacaacgacttaccccactgacccgtgagggaaagggaaaattatatatttatatatataaatttccttcccgatttcccgattgcgctctaacccacatttttacgcggttttcaagacttgagggaaaaagggaaatttccttgttttttcccaatttcccttgagggaaaaagggaaatttccctttttttcccgatttccctctcgagatttaaattatttttcatatataaatccgtttttaatatacagattagagcttgaattaacataatttcttatggttttttctgatttttccatatattccgcaatcattttgagtgtcacatcaccatcaattttacaaacttcatatgccgtttcaattgtttttttattttctctttgtttaacattctttttatttgatttagatttccaagaatgagtatcagattcagctgataaatccttaagaatatttgtatcatctattctgtgaatagggtaatcgaaccataaattaattggttcaaatttaggaaattctcttaacgttccatctatacgccatgctgtacggcttttattttcatctttaaccttcttaatatcttcaatcatcagtttatatgtattactctgtaacaattctgctgaaagttctaacatagtcctagcgctgcataaatcatcctgagaaacctcgttatctttactaaaacgttttatccatttgtagcatgttttacacactaaaacatcttcctgttgttttaaaacatcttctgttaattctaattctatcaaatcaataagagcgtcagggtcacgagcaaaaactccgctgccggatgccctatccatacttcttttgccgccttgtgctccctttgaatgatgatggcaatatattaccgcacagcccaattcggtacagaccttgtcaaactgattacaaaactttgccatttggtccgcgctgttttcatctcctgtaataactttatatattgggtcaataattattgctatatagtcttttttcacggctcttcgaattagtttaggcgccagcttgtccattggcgctgattttcctcttaagttccatatatcaatattattaatgttatcaggattccagtttaaagcagtataaacatctttaaatctatgaaaacagcttgccctgtccaattctaaattaacatataaaactctgcctttagtacaattccatttcagccatttcttgccttcagctatagcacagcacatttcaatcagagcatatgattttccggcttttgaaggtccagctataagcattttatgaccttgtcttaatactccatcaataagagatggtgacaattcgggtagattatcccaaatacttgcaatgctttcaggttccggcaaatcatcattaattgtttcaatccattctttccattcttcgaaactggattttccaatgtttgtagataataaatattgttttttcccatttcttataattcctggcattctagataagcgtgatggatttttattttgtttatctataattaaaccattcttttcacaaaccttatatagatattcaactctttctctatattcactataattatatgcctcaattttcactatagcgtggagacttttccctgcactgtacacaagacatgcaacaggtaattccagttcctcaataatagctttttgacgccctaaatccattacatctgattcaaccaaagcatatctaaaatccgtaacgttttcattttttatacctttaccatcaagagggttaaaacgtatccaagctcctgccttttcactataatcaccaataaccttacatatatctccttcacactttgaaagctcctgaattaaccttccggccgtcctgtcacacaagcctttagacgggaggtactttccgtttttctcccagctccgagtgacatatccaacgttttcatttgcttcaaacagtgtttctaaatatgtagttaattgttcaacaggattccatttttgtggtatgctaaattcacttgtttcaatccaccctttatcgattacaactaaatcatctttattgcctatctcagaattccaatcaaaagcaacatcttctttatgaaatttaaaaccattatcctgtgccattttcactatggttcctgctgttataggagaacttgaaccggaaaaagtattccactttttctcacattccccagcatgataacggttagcgtcacgtttgctccaatcatcccaatcctgtactgtatatccttcatatttaagtgccattccaacattaacccaatcctgataatcaagaaatgatggttctatatattcaagcagttcaaccaaattaatgttattttccatatcctatgctcctaattcgggattaaatgtagcggggttaataccatttggaactctccacccattagcagatattctcgtaatcaatttgcttgcagcttcaaactgccatgttccaacatgtttaaatcctttttgctctaagcatctaatttgttttggcgttgtcagtccttcatttttacgtttctcaagtctgtctaaaattttcgcagctttaccggagttttcaatttcatcaggcataatacccagcttttcgagtgcgtttttctgcttgtccgttggcggtgacatttcccagccaaatgccggaacataccctgataaatcttctgcttgtatactcatttcaaattgtatagggtccactaatttgcgtttcctctttttcatttccgacaactgtttagcaagagcttcttcacgctgcacaacaacatcttcactggcttgaacttctgcttcttctatatcaatcggacagcctgaagcttcaagattttcagtcattttttgagcaacttcttcattttcgcatattagatgagccggtctacaaagttcatgtcgttcagtgtgccaaagaaaatcaagtattaacaattcagttttaccggtttcaggtgataaacgtgttcccctgcctaccatttggcaatataaactacgtaccttagttggccttaatacaacaacacaatctacactgggacagtcccagccttctgtaagcaacatggaattgcaaataacattatatttgcctgaattaaaatcgtttaaaatctctgacctattatcactatttccatttatttctgcagccttaaaaccattttcattcaaaatattgcaaaacttttgactggtttttactagcggcaaaaaaactactgtctttcgcccatcacaatattttttcatttcatccgcaatctgatatagatatggttcaagagctgtacctaaatcactcgttttaaagtctccagcctgtgttcccacttctgttaaatcaagttttaaaggaattgtttgagccttaattggtgataaaaatccttctttaattgctgatgataatgaatattcatatgccatgctctcaaaaaccttaccaagatttttcatatcacctctgtcaggcgtagctgttactcccaataattttgattcactgaaataatctattactttttgataactgtctgatatacaatgatgtgcctcatcaataattatagtatcaaaatagtctgtatcaaattggttaagacgtttctgacgcatcattgtttgaacggaaccaacaactatacgataccagctgcctatacaactttcttctgccttttcgaccgcacatcttaacccggttacttttttaattttatccactgcttgttctaatagttcggctcgatgagcgagtataagtactcgctcgccattctttacacatctttcagttatctttgcaaatacaatagttttaccggtgcctgtaggtaatactagcaaagttcttttattccctttttcccattcggcaaatactgccttttcagcttcttgttgatatggtcttaattccattagaatttacctggtgtgaatgatttttttggtgcagattcatcgggagcgtaaaacctttttatatcattataaatatttccattatattcacgatgtccaatttttgctcttcctcttgctccgacaacttcattccaattcattttcaatttttcaccatgctttctctgaccaatacaagtaaaaaatgcacacaacaacccctcacaacgactatgtaaaaataatctgttttgtataaaacaaattcctttgtcattctctatttctaaagtgataattgccatattacaagccggaattttctctccgccttcatatctgccgcgttcaaaacctgttactttaaaattatagtctccatccggcaaaacgacatattccggtccatcattttgtatttcatcatcccagccatattctctttctgattcattactcatttttatttcctccaaattttattatttatttttcttcccaaggaagtgtctcatattcaactattactttatatacatcatcccaggcgcctatcagaaccccttctataaactcagtatcaaaattttcaattggtgtacccgatggataataacctttttgatgcacaacattttgaatcatttctttagtaacattgttttcaatcattaatttagctaattctttagggattccgtcaacattaattttcttcatttgttgtttatttgttttagtttcttcatcttgtttcggaattttatcaataacagcatcaatttctctttctatttgttctgtctgattaagtttaacaggtgtttggctctgtggttcaaagttatcaaatatatttgcaacatatttataatcaaatggcagctcgctttctaatccatgcctgtttttcgcatcccagcatggatgatgagttgtatacattacacgctttccaccttgagctttatgtttttttccatctttatcaacagctacagaaattgttttataatttgcaaatagaaccatatcagcccattccttcacaagaggtgctgtttgtgaagaagttttctttccgagtttcagttcgtatctgtcatatgcaccaagttcatcaggctgctcaaatttacgtatttgtgcatgtgcagctaaagcaacatttattcctgcctcaataacattatccagcaactttaaaaatcttccaaattcttcttttacatatacatatccggtaccatatccaaaatcctcaattccatttttaccgtacttttcaagtatgttttctgtacaaagctgttcagcccaatcaattgtatctattgtaagtgttttacagcagccaggattttgaataacgtaattaatttcttctaacaattccatccaactttgcgggtttggcaatctagatacattcatatgttttgtgcttccttctgtatcaataaacaacggctccggaaaacaagataaaaaagttgatttacctatcccttccggtccataaactacaaccttttcaggcgttttttgtatacctttaattatcttcatgaatacctcctgcttctacttaatttgaatattttgattttcttcaatatgtaaaccttcaagtaatacacctgatttaatagcttttttggcctccactttgtcaaccgccggttctgtatattttaaatactgcttgtctactttgttaatatcatcaataacaactgattcactcttacgatatgtaatattaacctttggtgattcaaacttttcacccgcaagaaattcattcaaaaatttcttaatactctccgctttatttttggccaccctttcacgctttgcaaaataatctttttcggatttatacgcattaacctcagccatcaaatttttataatagagagccaaattttttattttatcatctctcatcatctgcagcttatcagctctttctgtatcaatcccaataacctcgcctgtttcttcatcaattaagatacattgttcaatttctgcgtcaatttcatataatttcatgctaaatttctccttctctcagcttgacaattcttttattatatgttatattgatatagatttcttgttatatatattttttggtccggtttgtggttccgcacagctggactttacttttatatcctccagcctaaattctctgtactgttcattgatgtccttgtccatatatgccatagccgcaaaattgcagtccataacaagcctgtcaaactttgaatttccacatataactattggttttataataatcacctcacattacaattttatgtattcttttgctactgttatttttataatccctgctgcactccgcgtccgaaaagtcccaccgccgattatccggcttgattacgaccttacgcacatcgtcagctatgggttgttcttcagctgtgtcctctgcgcaattaaaaaatgccaaaagtatcatcataagcggagctgcgtaaaatatgggataccactcaagcgacctaaccataactaacaatacaacgccaaccaccgctcccgatattcgtataatccagttatacaattgatctcacctccttatatactcccagtatttcaaaactggcagaaccatacatttcattaaattgctgttttgccagctttgccgatacagattttacagttatatatttagttgcaggcgccccggtctttagcctatatttaatcaaaaaattatacatcctcaatcacctctttctatatcaggtcaaatttaatttttttaactaccatttaacatttaatagttagtttttttattcactcaagttttttgcaaacgtctcagccgaaatatattttttaccacccaaaaatgtgcgttttgcaaaatcataacaagtccctgtatagtcctgaacatccttaatacacaaaagatgtgatgtcaggaactacagaattgttgccggaaagctcagcaggctcaaacggaaacttgacactaaaagtgccgtatgaaaccgaggcggcagtaacaaatccttcaaaagtatcagtagtgtatataaatgacgccggagaaaaatcaggagtagcgtcggcatatgacacagcaggcaaaaaggtaataacaaagttaaagcatttgagcacatatgcaataactgacagtttgggatatgagttggttacagaattagtaacgccgtcaaacgagaactttaaccccggtgacgagatagcggtagcggtaaaagttaagtccagtgaaccgactaatttcggaagctttaatatagctcttgactatgacagcacaaaaatgacattgacatcagtagaagcgtcagacgctataaaaacaaacggatataatttggtgcagggagaaggagcggagcaaaataagattgcgtatacgtcaggaagcagctcggttgatgtatcaagcgaagctgtaactataatgacagtaaagtatacagtaaatagaggaatagaaacagcggctaatgtatcagtaggaacgaaggacggatattttgcaccaacaggagctgatactgatatagcagcagtatcaacagctgaaaccgttaatctgtataacctaaaagtaacactctcaagcggagatggaaacactgtttcaggttcaccggcagcatattatacaaagtataatacagcaggactatacacagacgacagttatactacggcagtgacagatacgcaaataaagggactggtaactgcaaacgagaactaccgtttggcaaaagatacaacagaggaaccgctgtggaaaacaagcggaggaacagggtatacaagcacagatttgacaacaggaacatatacggaagatacaagtctgacagctcaggcagtgcgccaatacaagataacatttgagccgggaacacacggaagttttgcagcgggagcagtgacagagatagcaaaggatgtaaactcaaaattgctgcagtcagacctgccgacaatagaagcagaagcaggatataatccggatggctggatgagcggagatgtaaagatagacctgagtacatatgaagtgacaggagacgcaacattgacagcggcatatacagaagcccagtatagcgtaacatttaatactgtgacaaatggagcgtatacaggagagacaggagtaacagacggaaaagcgacatatggaacagatataacgttcagtgtagagccggcaaacagcggtgatatagtaggatatgtatattacacagtaaacggaggaaacaaaggatacttaacaggaagcaacggagtatatacaatcccatatcagatgtttggagagaatatccagatatatgcaggagtaataacaggaacggtaaagattgtagcgcacgacagttacaatgcggcgccgagcggaaaagatttggtagtagtaacgacagcaaagaatgaaaatgccaaatatgtattgcagtcagccggaacagcagcaatagaaatgtattactcagaaggcctgggaggatatgcggcatttgtatcgaacaacggaacaacaattacggagcaggaagttaaggacagactgtcagtaatggagggagagacagccaatacagtgatagcgcatacggcggacataaacggagacggatatgtaagatcagtagacgcgatgatagtaaacgacctgtattacaacaaccgaatcggagacacatcagacgaaatgagaataaaagcaaactactataacagtgacgacgcggtagacacaagtgatatagctgcagttctttatactgttgtaggacgttcttttactaaataagactggaggattagattgaaaaaatatatttcgctatttataatatgttgtatgtttttatctttaatgccgggaacagcagtatttgcggctgctgattttgattttattttaaaatcaggcggtcaaagcacggtaactattggtgttggggatgaaattacagttgaatttgaattggtaaaaaatgatggagcttcatattcaatgtattcaatgcagaatgaaatattgtatgatactgaatattttgattatgtgcaaggcagtataaatgttgaaaacggatttaagtatggatttagaaaacttgagtcttcaagcggagcaaaaattttaattggttttgttgattcgagtgaaaacggaaccgaacgcagcggcagaacattagtcggcagttttaaactaaaggcaaaaaagacaggaaacagcagtataaaaaatgattctgcttatgtgacaaaaagcgatttaagcagatattcatcatcatattcagatattgacgcggaaatagtagaaggttcaatatccactccaacacctgttccgtcattgcagccgacttcgggacctactgctaagccaaagccaacctcaaagcctgatacaaacggaaacggtggaaatggaggcggcggtggcggcaatgatacaaataccgccacaccaaagccaactgctgctccttcagcttcagaaggaccgacatctgaaccaataataacaccggttccaacaagtggaatttctgttcaggtctttgatgatgttgaaactggttattgggcatatgatgatattatggagctttattatgcaggtatagttaacggagacagtcctaatacatttttgccggaaaataatattactagagcagagtttacgaaattagttgcattgctttttgagtttgaggtagatgaaaccgcagagacaaactttgtggatgttcctgcaggtgaatggtatactccatatattgcagctgcatacaatgaaggtattgtgacaggatattctgaaactaattttgagcctgataaaaatgtatcaagacaagaaatgtgtgcaataattggcagaaaacttaatattgtatcagataaagaaactgtatttactgattctgatgaaatagaggattatgctaaaccttatgtgcaatctatgacggaagcgggatttataaagggatatgacgacaacacgttcagaccgtttgaaaatgctacaagagcagaatcggcagctgtcattaaccgagtaaaaaaatctaaatagacgaacaaacatgaaatgcgtttcatgtttagttgggcaacagagctattttgaagctctgttgcctttttagttataagctgaagattaaaatctgttattttaataaattataaaaatataatgtgtataatgtgtataattgacaaaatataactaataaataacaaaataaatgtagcaatcataagaaatgtgtgctaaactaagtttagttgttagtatttactgtaatgttgtgaaatatataaaaatataaaataaatttattattaggaggtacattatgttatcaaaggcagacagggcaggtaaatttttaacgcgtatttttctttgtgcggcaattattcttggaactatggttcagttcgtttcggcggcaacccaggatttgagctatccggctcaattggtgaaaatttcagtctatggcggtgaacgaaatttaaatatttccgggtatggtgaaggttctgctcttaatacatggaattcaaacggttcaacaaacgagcagtggagaattgattatgtaagcagcggagtttttaaaattgttaacgtaactacagacaagctggtatcagctgaaaataattctgctgtaagcaacgcaaaatgtgtacttcttaatgataacggaagttcttctcaaatgtggaatattgttggtgttcagcaagattttttgggaaacgatttatattacaaaatttctaactatgcaaatccagaccttgttataagttataatacaactacaaatgctattaccttaaaaacttatacaggcgccaacaatcaaaaatggaagttaaactgtgatggtttagacggttttgccggtaattgtcttgttcaggaaggtgaaaaagctggtaccattggaggtttattaggcgaaacagtatatgtgtcaaatttatctcaacttaaaagtgcattgctcagcacgaaaccgcttacaattgttataactgcaaatattgacaactgcaacagtgaaatgtatgatttaaggatagaagataataagacgattattggttcttatggtgcaaataggcttactgacccccgtctgcgcacggacgactattttaaagaggaggcggtaagcaataacattgttatcaaaaatattaatttcaatattgctgaaagagaagatgtagttgcttttgcagtatatggttcaagaaatatttggattgaccattgttcatttaattgctcattagatttatattatgatgaagtaggtaagtttatttgggtaaacagatgcgaatatgcaagtttagatcctgattttgtaaccatatcttataatgaatttaatcatagattttggggtatagcttttggagctaaatatactgcagaagatagggcgagcgctatgtataacaaatttacttctgttgttcaccgcgcaccgcagcttggaaacggaactcttcatgtattaaacaactcatattatagaaatgattctaccctttataatgacggatacgcttccataaaatgcggagctggttcggcagtatattctgattcgaacagatttgtcggatataggaaagaatcaagcggctattgggatatggaagttacagtagattcttcagccagtttcatagaccatggttcatatacaaacaagggtgaaacacctgtgtctgtaccttataagctagcagcaccgactgatggaagcgttacaacatggagcccgtctgaaaattatggttatagtattgtaaaagcctatggaaataatgatattacagtattctgtgataattattccggagcagtaaagaacttttctgaactgcattatataaatcatgaggcttgttcaaattacattgattcaactgtaatttcgcctgttaattttgcctttagtgacccggataatgacggtgatgatactgtagataccggaatcgttgacggcggaaaatatatgataaaaaatgttaacagtggtctgtatcttgatgtagctggcggtgctgcgtcaaatgggacaaatgtacagcagtggggggctagctcatccgcttcttacaatacgtggaaagctgttttggtaggaaatggatattatcagctttattctcaggttggtgatggaaacacatatttattagatgttgcagacgggaatacatcaagcggaaccaatataaggatttggcaaaatactttttgtgacgcacaggtatttaaactggagaagcagagtgacggaagctatgctattttaactaaaatcactaataaccaatcaggtttggatgtggaatcagggtcaaaatccagtggtgcaaatgtacagcaatgggggtacgctggaggtgcacatcaaaaatggatttttgaaaaggtgaactaaaatcactaaataaatattggtaaaataactaaacattggaacttttttctaaaacattcgtcttattaagtataagtgattattttttgcttatataaaatgtactgaaaggcggagttattatgaagtgtaagaaattagtttcaatgtttttagttgtctttatgttagtttcaattgctttaattcaaacaattaatgtatcggcggatagttccgggactatttatgtttcctcttatcctgatttagtgaacatgatgaagaatcctggcggaagttatattcttttaaaggatatagagataaataacgctgataattttagtgttcaaaattttagcggcatttttgacggcaatggtcatagtataagtttctcaaattcaagggcaggcggttttgttgaagttcttgaaaaaggagcaacgataaaaaatctccatgtttatatttcagcggcaaccggtactgataacgtaggtattattgccggaacttcatatggaacgatggcaaactgctgggtttcagggtatgtcagcgcatctggtgttaattgcggaggtcttgttggtaagctttcgggtggttcggtgagcgattgttattcgttggcaacggtaagcggaaccagtatttatggaggactaatcggagcagctgaaaatgcaagtgtggaaagatgttatgtttcagcttcaatagagggggcaagagctgaggcggggtcttttttgggaagcaacagttcatcatcagtaaataactgttattataattctagtaaaaacggagcgtttttaggggtaggaattggttcggacactgtcactgcaaagactagtgaagaaatgaaatcagcggagacttttgccggatttgacttttctaatacgtgggtacatattgatggtgaatttcctaaacttgtctgctataacggaaagggaacttcagataatccatataaaattcacactaatgacgagttaatatcaataattcagccatatctaggagatgcaggcacaggcagatattatcagctggctgcaaacttaaaaaattattcaggtccatcactgggagatgatagtagcagatttaccggtttttttgatggaaatggttatgtattttataacaccaatatatcaagcggaggaattttttattcagttgctgaaaatgccgttgtaaaaaacgttgtttttgatggatacaatttttccggcggaggtgtagctggcgctgtcgcttcaataaatcacggaacaatagataattgtcatgttggaaatggtacaatttcaggttcaaaagatttaggtggaatcgttggagagagtattaatggcactgtcactaattgttcttttacaggcgatattaatggtcgtggttccggcataggcggtattgtgggatataacagttacggcacaatattgaattgtgcggtctattcgggaactattagaagctccgatcatagtgttggaggtgttgttggggataactccaatggattagcagaaaattgtttttcacttgcaagtgtgaacacaagtaccagcgaaagcggaggagtcgcaggaagactgtataatggagttatacgtaatagttattctaatgctggagtttatggaaacgactcaaatagtatcggaggtattgttggcagtataatcgaagacggagttgttgaaaactgtctttacaataaagaacttgtttctgttttaataggtggaacagaggataaaactggaggtatatcagcagatgaactcaaaaatgcttattactattcgggatttgattttacttcggtttggactgtagatgaaagcggagagtgtattgtattgtcttcgatttcaggaaagggcacaaaagaaaatccgtatttgattagaacatcttcagattggatcagagttggaattgggataaaaaacagcggagaaagaaattattataaaataatgaatgatttattctctgtaagggccttaggtcaattttgcggaagtttggatggcggaggtcatgaggtaggacaacataacggaaatttgattaccacattaaatccgggtggatatattggcaatttaacggtttcaggaataattgttgagaccgttgacaaagcaacaatagagcattgtacagtatataattcaaatgttagctattttgatggaggctttgtaaataaaaatttgggaggtaaaatttctgattgttcagtaattgactcaaccatttctttgactgatataacaggcggatttgtagggcaaaattccgaaggcggagtaataaataattgttatataatgaattgtaaagtttccggtaatagtattgccggtggatttgttggaaacaacactaacggcacaattgaaaattgttatgtttatgacactgttgtaagcgcgccaagtactgttggcggtatggcaggaagaaatgataataacggaaagattaataattgttatacgggggcttctgtttcggaagcgaattatgcaggagcttttgtaggtatgaattacgcagcaataagttcttcgtatgcaaacggtggatattcagcaggcaatgctgtaccggcagtgaaatttgcaggattgaatgaaggaaacatcaccggagaaaatcttgatttcagcggaaatactttaccatataaatatattcaaacttcaggtttaaatatatctgttaacgatacaacggtttatacacctcaaactcctgatgttacaccaggcggattaactgatattagcggtcattgggctgagcaaaccataagaaatctggtttctaaaaatgttgtaaacggatacgaagacggaactttcagacctgaggatagcgttactaagggagagtttattaaacttttgatgagtgcaacaggaaaaggaacttctgacggatttacaaattataaagatgttaatgcgagttgggcaagaccatatgtaagtaaggctatatatcttggaatttgtgataatataagcgacagcactgagatatttggagttgacaagtctataacaagagctcaggcagttgctcttatgggcaggttattagcgccggataaaacaggaattccatcgtttacagataacagtagtattccggactgggcgtcaaacgaggtttattctatggttgaacttggcttaataacaggtatggaggacggaagctttaaacctttagataatcttacccgtgcagaagcggcaacaataattgaacgtattatgaatttagggtaggtaataaatatgaaaaataaattaacaacatttatcctgactgtttgtttggtttttagcatagttcaaataggagctgtgtcggcagatgatagtttgactgttacttcaccaaacggctgtatatccatttcaatagaaacaaaagacggaaaaataaattatagtgttaagtataactcaatcagcataatcgaaagttctaatattggaattacattttcttcagttgattttagtgaaggggtaaaatatgtatcatcatataagaatactgtagatgaaacatattcgatgctgacaggaaaagcatctgtatatacaaataaggcaaatgaaacagttatgacatttgaaaaagacgggcatttgcttgatttatatgtaagagcttatgatgatggaatagcgttcagatatgggttcaatgaaaacggtcaggcactttcagaaaacacaactttcagattacctcaaaattgcacagtaaatgctatggaatacgaaatgtgttatgaaaatttttataatagacataacttatatgagctgaatggagtatatggtatgcctatgactgtcaaggttgctgataatacttatgctttaattaccgaagcggaacttaatggaaactatgcaggtacagtattaaatgctgacggcagcaatgttttaaaactaggatatgagcctaaacaatcagagccggttgaaatttcagcaccatttctgtcgccgtggcgcactgttataattggagaattgaataccatagtctctactgaaatgcctgaaaatctatgtgctccttgcaaattagaagatacttcgtggataaagccaggagtatcaagctggacatggtttaacggtgacccaactaatgaccctgaagtttataaacagtatattgacttatctgccgatatgggctggcaatacgtactgttggatgagggctggcagccattagaatacgatgagtatgggagaaagacatatagcggaattatggattggacagaggaagttattgagtacggaaaacaaaggggaattggtattattgtttggtctacaagctgggatcttgatactgaacaaaagcgcgagagattaaaagaatgggccaatatgggtattaaaggtataaaagttgacttttttaatagcgaaactcagcagacgttaaaacttatggactcaataactcaggagtcagcagagttaaagctgctggtaaactttcatggatgcgttaagccgacaggagaacgcagaacttggccaaatcttattacgcgtgaggcagtatatggaaatgaacattttttaagtggagaaaattggggcccgacggctgagcataattgcacattgccgtttacaagaaatgcagtaggaccaatggattttacacctgaacttactaatcataatgataaaaattattttaccgatggtcaaaaatgtgcgttgcctatagtttttgaatccgggatacagtgtttgtcagataagcctcaaatatatgaaaatagtgcggctcgtgaattatttaaaagcattcctgctgtttgggatgaaacgaagctcttatcaggagatattggagaaagtgccgcagttatgagaaggtttggtgatacatattatgttgggagcatttgtaataatcaatatgttgtggatataaatcttgattttcttaaaagcggcaagtattggtttgaaatgtatactgacggttccaatgatacagatatagctgtttataatggtgttgttactaatcgggatacaataactattccgcagttaacgcacggcggaggagctgtaaagtttacaccgataaaagaaaatacaaagttattttcggacattgacggacactggtgtgaaaaaaatatattatcattagctgaaaaaaataaattgaataaatatttttacggcgagtttggagtggatgaatatataaccagagctgaatttgttatgcttttgacagacgctttggatataggttgtatgcaaggaagtcctagattttatgatagtataaggcatattgctaagaatcatatttatacagccacagaaaaaggtattattaatggaataagtgaggaaacgtttttaccggaatcgaatatcactcgtgaagatgcggcaactataataggccgatatgagaatcttaaaggcggtataaacagtggattttctgacagcaatgagatatcccaatatgctaaagagtatgttgcacaatgtgttgcaatgggagttataaccggatacgaagataactcgtttaagcctaaaaataatattactaaagctgaagccgctgcaatgctgtttaggtgtcaaaacttaaagtgatacttttaaatcccatgatttcatatcatgggattttatatttttatttctttagaatatgctgactttttagttgcaaatactattattgttatatcaatataaaaaaacgttatagctattgccaatatatgttaaatatgttataataaaaataataaactattagttttatttataaatattgataaaaatttatataaaaagattttatctttttttgggagatggggaaaataaataaaataaaaaaatatattagatatgtttttcctttcattttagctggtatgttttgttttataagtgttacgtctattgttacaattattcatatgcagggtaacgcacgggtgattaattataccggaattgtaagaggtgccactcaaaggcttgtaaaacaagaaatgaatcagtacccaaatgatgaattaataaattatattgatggaatacttcttgaactttcaacaggtgatggtgagaatggtttgagaatgattaatgataaagaatatcagggattagttaacgaaatgaaggaaaagtgggaagttataaaatctgaggtacagtttgtcagggctggaggagataagcataaattatttgatttaagtgaagattattttgcgcttgccaacaagacagtttcttctgttgaactttatactgaggagcgcgtaaaaagtgcaaagtggactttgtttgttttaaatgccggttttgttatattatttattttattctttatgcttggtatgagacaaaaaaaggttcaaacagaccttatatctgctaaaaacgccagccgtgctaagagtgaatttctttcaagaatgtctcatgaaataagaacgccaatgaatgggattatcggaatgacagcggttgcgcgtatgtctttggataatagagaaatgttgatagattcattaaataaaattgatttgtcttcaagttatttgttatcactaatcaatgatatactagatatgtctcggattgaaagcgggaaaattaaacttgataatgaagtttttgagatcactgaagttttaaaacgaatatatataatgtttaagcaaaagagtgatgagagcggtatagattttaaaattaaaagcgataatgtaaccgtaaataaagttattggtgatgaattaagaattagccaagttattattaatataatctctaattcaataaaatttactcagttcggcggtaaggtaactcttgatgtcaggcagaaaatcgatgatgatgaaaaagttatatttgaatttgttgtttctgatacagggataggtatgagtaaagaatttcagagacatatgtttgaaccgtttgagcaggaacggaatggaaactctcatcaatatgcaggtactgggttaggattggcaataagttataactttgtaaaattgatgggcggtgaaatcattgtacatagtgaattaaataaaggttctgaatttgttatttatttacctcttcaaaaagcagaaaatgcgaagcttaatgaaaaacaagataaaaatatttttgaacaaaagaaagaggagcttatgaatctttgtgaggttcatatccttttagctgaagataatgaaataaacgcagaaattattacttttttattgcaaaaatgcggtgctgaagtagatttagctatcaatggagaagaggcagtgaaaaaatttgctgaatcagctgttggaagttatgatttgattttgatggatattcaaatgcctataatgaacggtttggaagcaagcaaattaataagagcaatggagcggccggatgcgaaagatattttaatagtgggagtctcggcaaatgcgtttagtgaagatgttcaaaaagctaaacagaatggaatgaatgaatatatatccaaacctatagatatgtcgaaattgtttgaggctattaaaaagtatttataattatatataaatagaataagctttaactaaaaaatatttgaaatatatactttcttttaatgtggcattttgttcttttatagaaaaataatttgtattttaataatgacagttaaagatattaccggttttaaaagctgataaatttggtgagagtgaacaataaaaaactctgtagacaataaattctcattatttatataataaaatcataatttggttatatccaacttatgatttgtaaaaaatccggcaatctggacaattaagttagcgtgctgccttgattatttcacaaataacctaaaatttgttaagcatgttttttaaaactgcagaaatacaaaagaggttatgttggtgagatagattaaaaagtgcataatataaatagaataaaaagtagcgggatagcatgtgctatcccgctactttctggtaaacttaaagtataagtaataccgattcaaaaatcaatacatttttgaatattaaaccatttggtgactcctaggggatttgaacccctgtagccggcgtgagaggccggagtcttaaccacttgaccaaggagccatatggtagcggtaactggatttgaaccagtgacactacgggtatgaaccgtatgctctagccaactgagctataccgccaaatactgttattccttcaatttgcgaacaacagttaatattatatcagagaaaataatatatgtcaacactttttttaaaaatttataaaaaattttttaatgcggctttttaatcttttacagactatttattggtttttaaattttctttttttatgaatatcaattcttaaaaaagaaataatattaatatgctgatacgatatattatatatggcttgctcggaatgaatatggaaatcttctggaccagcctttcgggaataaaaagcggttctcataatttaattggccatacttctatatggatgttttttatatatggtcttgctgtggtcatcatggaaccaattcataatttaattgctgaccaaaattggtttctaagaggttgtgtttgggcttcggtaatttttgtcatagaatttactaccggaggtattttgagattgtttcaaattgagccttggcattataccggtgaattttctatcatggggcttattcgaatagattatgctcctgcctggtttgccgtcggcttactgttcgaacgtattcatactttgcttttaaattataatattgggctgaaataggtgattgaattaactgtttatcattttgttcatatcttttctcagcctttttataattcttttttcaagtcttgaaatgtatgactgtgaaataccaagaaggtctgctacttctttttgtgtcatttcatcgccgttattgtttattccaaatcttaattcaacaatatttctttctcggcctgaaagtttttccattgcaagataaagcagttctctatctgtttcgtcttcaatgtttttttgggttacgtcattatcagttcccaatatatcagaaagtaaaagttcgtttccgtcccaatcgacgtttagtggttcgtcaattgatacctctattctgttattattattttttcttaaatacattaatatttcattttctatacatcttgaagcatatgtagcgagttttatatttttttctggcttaaatgtatttattgccttaattagtccgatggttccgattgagattaagtcttcaatacctataccggtactgtcaaatcgttttgctatatatactaccaatctcaaattgtgctcaattaatatttgtcttgccttgtcggaatagtcaggatttccaagtctcgatgtccaccattgttcatcttctttattcagcggaggaggcagagtgtcgcttcctcctacgtagaaaactttgccatccttttttgaaacaaagtttagataaagctgttttaagtacttttttagtttttggtacattattcttccccctgaagatatatttattatttttttctgtaaaggcgtccgggcttgcaattgcattataaagaccatcgctgcaaaactctgtatttacgaacccaacatagcaattttttttgtcaaaataatattttccatattttgttgttatatgttcgggttcaaataccggtattaagttatcattatttttggatacagtagatattttaaccagcctatattttatatgttcgttttctaaaaatgtatatgagtttttttcgccgccgattaaaataacaggttttccgcttagcggttcaattagctcacatcctgtgtccattaaaatatttagtttgtattttttattcatcaatatcaattcagcgctttgtattattttatttcggcttaggtttctgctgcatatttttataaaagcgagaataatcaaataggcagctataactaatgatataagagttgtaatgtttaagtccaagtatggtaccccgtttgagattatagatgtatcttttatagaaatttgatatgctataaaataaacaaatcccgaaaacaataatgatactataaagaataccaaagtatgtttaatcagtttaataaaagtgttgcatttataaaatatcattacgaataaaacagtaaataatattcggcctaataaagtatataacaaatatgtatgcggaaaaaacataattacagaatatagagctgatattgctgaacctagtgccagtctcaatatcgtggttctaaatctaataattatgcttgctgcaaaaattattaaagagttaatcaaaaaattgcttaaatataaaatatctatgtatatggtcaattatatcaccaaagatattatagagcagtttttgaaaaaaatatgtcagaatgggggaaaaataaaaataaattaattgatgtgaagtaacttcgcattttaatgttaaaacaataaaataacaaatatttatagtatatagataaaaattttttaattttgtgtcttgaattccatattgttatatgatacaataaaaaagttaaatacatatatttagaaaataatattaaatttttttaatgtaatctttaataagggaaggttgataaatgtggaaatcactataaacaaaacgcaaaatcctaaggtaaagcctgatatgagtaatttgccgtttggaaagtatttttcagatcatatgttcattatggactatgacgaaggaaagggctggcatgatccgagaattgtcccatatggaccaattgaacttgacccgtctgctatggttttccactatgcacaagaggtatttgaaggtttaaaagcatataaatcttctgatggacatgttcgtttgtttagaccggacaaaaattttgccagattaaatgtttctaatgaaagactggcaattccgcaaattgatgaagctttatgtcttgaaggtttaaaaaagcttgtagaattagacaaagaatggattcctgagcaggaaggcacgtctttatatattagaccgtttattattgctaccgatccatttttaggtgttaaaccatccgagtcatataagtttatgattatatgctcgccgagcggtttgtattatcctgaaggtttagctcctgtaaaaatatatgttgaggattcttatgttcgtgcggttcgcggcggaacaggatttactaagaccggcggtaactatgcaggcagtattagagctcaggttgttgctcatgagaagggatattctcaggttctttggcttgacggtgttgaacagaaatatattgaagaagtaggttctatgaacatattctttaaaatcaatggtgaagttgttactcctgctctaaacggaagtattttgagcggtataaccagaatgtctactattgaacttttgaagtcttggggagttccggtatctgaaagaaaaatatcaatccaggaagtatccgacgcttatgataacggtactcttgaagagtgtttcggaaccggtaccgcagctattatttctccggttggtgagcttagctgggatgataaagttatgttgataaatgataataaaatcggagagattactcaaagaatttttgatacaataacaaatattcagaccggaaaagaagaagataaaatgggctgggttttaaaagttgattaagtaattgattgggtattataatatatataatataattaggaatgcaggcatcagtgtcatttaaattcaaaatattttgatagaatgaccaatgcctgtttttttataatttaaggggatgagctgatggagcgcggaagtggaatattaatgcatatttcatctttccctgcaaaatacggaataggtacaatgggaaaggaatcttttcaatttgttgattttttgaaaaaaagcggtcaaaaatattggcagatcctacctattggtcctaccagttttggagactcaccgtatcaatcattttcaacttttgcgggtaatccttattttatagattttgatttgctgcgcgaagatggttctttaaatttagaggattattctgaaattgattggggaaacgagcctgacagagttgattatgaaaaaatatttaaaaacagatttaaggttcttaagattgcatactctagagacagaataagaaaaaaggcggaaatagataattttagatttaatcattcatattggattgaaaattattctttatttatggccttaaagtttgataataatctaaaaatgtatcgaaattggaatgaggatattgtaaaaagaactcctgaagcaattattaatgcgtataatgatttaaatactgaaattgatttttgggtatatgtacagtatttattttataaacaatggtatgcgttaaaagaatatgctaatatgcagggaataaaaattattggagatataccaatttatgtagcagaagacagcgcagacgcctggtctcataacgaggtgcttatgcttgatagctgtggtattccaataaaagtggcaggttgcccgccggatggttacgcacccaaaggtcagctttggggaaatccgctctataattgggactacctagcttcaaccggttatgaatggtggatagaacgtttaaaagcggctttgaaaatgtatgatgttgttcgtattgaccattttagagcttttgacgctttttatgcaatagattatggaaaacctgacgccactgagggagagtggcttaaaggtccaggagttgatttttttaataggctgaaagaagctttgggtgaatctcccgcattaatagcggaagatttaggaactataacggatgatgttagagccttactgaaatacagtggatttcccggaatgaaagttatgcagtttggcttttctccgggagaaaatagtgattatttacctcataattataaaaataattctgttgtatatattggcactcatgataacgatactctaaaagggtggtttgattcacaacctgaagaagttcaaaattttgcggttaaatatcttcgtctgaataaagatgagggatacaattggggatttataaaaaatttattatcaactgttgcgaatacggcaatagtaacgatgcaggatattctgaacttaggaaatgatgcaagaatgaatacgccttcaacactgggaggaaattgggagtggagattaaagtctatggatttgctttcagactctctttcttcaaaacttttagaaattactaatatttattcaaggtaagttatattttgtttggttcgcctggaaaatttgggcgaacctttttatttagaataattttataaattatattattataattttgttaacctacttgaagtttaagcttttatttgctataataagtttcaaaattaagaaaaatgtctgattagggcgtgtttaaatgggcaaaaaaaattttgaatcaaacaaaggaaaaagcaaacgaatatggatttattctattattggcgtgctgttggttttgactggagtttttttattaagtgaatctcaatttgacgtaaatcaaattcctaatttgttttcagagatgaaaaatatgctgtttgataaaacagagaataaagttcaaattgccgaggaaatgcctgcggctaaaattaaggcgtattcagaacaaacatcggttgttgagcctgacaaaataactccgtctaatctaaagagtgctgatggaacttataatgctgaaggcggagctaataatctttatgacggagatatttctacatgctcaggaagttccagttcttgggcaactctagatgctggagagttaaaaactctttcatatataagatatataccaaacacttcatcgcaaatcatgggcaatacatgcgttggaactaaatttttggcttctaaggataataaatattttgttgagctgggaacagttaatcctgacgttaacggtgatataaatttagattggcatacacttgagttcagcggttatggagaatacagatattttaaagttgagctttctccgtatgcgtcttttggagaaattgaatgggtaagtgatactggtataatcgcagatgaaaatgataaaaccgattttagttttatggcgtttgacgctatggaaggatttgaagggtatactgtcttatctatatataataaagataaaatattaaaatgcgtggaaactatcgactctgattttaaggtgggtgattatacaaagctggaattttctgatattcaattagagcttggggattacatacgagtaataacatatgataagcaggatatgaaaatggcggttgacttacctttggattatcgctttacggaggcgtcttcaaatttatcggtttcaaatatatatagcgataatatgatgtttcaggcagatcaggaactcgtgatatcaggaaaaggagtgtgcggttctgaggttaaagcggttattaaaaacatggatacgggagaagaattttcgggaagcgatattgccaaagatatttccgactgggagataaatttaggagtttttgaaaacggcggaaattatgaacttttaatatcgtctgaaaatgaaaagttagaatttgcgaatataacctttggtgatatatgggtttttgccggacaatctaatatggaattttatctgtgcggagaaaaaagcggaaatgaactattaaatactaaggaaggtaagaagaaatcaactactgataaaatcagaatgataaatatgtataatatcggatacatgggagcagcaggtgaagttgagaatgttccgctaaacgactggaacgagtattggacagagctcacgcctgacagagtttcttatatgtctgcaatagcatattatttttcccagggaataaaagaccgatatgaccgtaatgtaggaataatcagtgtagcggtcggagataccgaaattaatcaatggtatccaagaggagagagttttggaaaatttacaggtgacagcggaaagctgtacaataaccgtatatatccatttactaagcagaaaataaaaggtattttatggtatcaaggtgaagcggataattacagaactaatatgaatgctgaggaatacagcgacgcgatggccggattaattgatctgtacagacaaaaatggagcagtgaagatttgccgttttattatgttcaattaacaagatatgaaacgaaggatgcaagtgaaattcgagaagggcagcgcatagccctccaaaaagtgagaaataaaaagaatgtaggaatgtttggtctgcttgatataatcggacggtatgaccaaggagaaggatgtgcaagaaccgatattcatccatggcagaaagaagtagtggcagatagatttcttgattatgtaggacatgatatatacaaggattcagaagccaatacttcaggaccagtataccagtctaagcagaaaattgataataccatagttttaacttttaagcataaaggaaagttaaaagttatggataaaagtcaatatgctgattctgtctgcgagcaaaaaatatcagcttcatctacagataccagcattttgcatgagttctggatttctgatgagaatggcaaattttatccggcaaatgcaagaattgaaaatgataaagttgtcgtatggagcgacagcgtttctaatcctacagatgttatgtatgcttggggagcgtatcccgaaatgccaaatttaactgatgattcaggacttcccgcagtaacttttaatacatataacggaagtgaagttttatagtgtttatttgataaatattttgatttattgttttgaccccgcctaatatattaagcggggttaagtatagcatggaataaaaatattaccggtaaaatttataatatgaccaaaaaattgtcaaaaaatatggtttgtttataaaatagtaatctaaattattgacattaaagtcattcaaaggtataataaacagaatgctaatttgagtttttttggtctaaaacattttcagtttttatactgtttttttgcactctgattctaagtataaaatctaaaatttgtgtcttttggcagtttattttgaagatgatattttgttacataggaggtatttaaaatgttgaaaacatttcgtggcggtgttcatccaaacgatatgaaagagccaacagccggaaaggctatcgttgaacttgatccgtcgcaggaaatggtttatcctgttgcccagcatataggagcgcctgcaagtccgattgtcgaggttggtgatatcgtttatgcagggcagaagattgcagaagccggaggatttgtgtctgcctgtattcattcatctgtatcaggcacggttaaagcgattgaaaagaggcttcatccaaatggattaatggttaattccatagttattgaggatgacggacaggatactatttatcctaacttaaagggctgtgatgattatacacagctttcgcctaaggaaataattgaaattataaaagaagcggggatcgttggtcttggcggagctaccttcccaacacatgttaaactgtcgccgcctccggaagctaaaatagattatgtaatagttaatgccgctgagtgcgaaccatatttaacatcggattatagaacgatgcttgaaatacctgaacagattattggcggattaaaaatagtaatgcatatttttggattaaaagatggttacataggtattgaagataacaaagagctagcgattgagacgatgaatgctcttgcggcaaaatctaaagatgttgatattcatgtggaaaaattaaaaaccaaatatccgcagggcggtgaaaaacagcttattaatgccataaccggccgaaaagtaggaccgggacagcttccatatcaggttggcgccattgtgtgcaatgttgatacttgcagagctatttatcaggctgttaaaagaggtctgccggttatgacaagggtagtaactaccggcggtgactgtgttaaaaatccaggaaattacaaagttcgtatcggtacctctcttaaagatgttattgagcaaacgggtggatttgtacaagagccgaccaagctgataatgggaggtcctatgatggggatggctatccctacacttgatgtgccggcggttaaaggcacgtccggtcttttagcttttggcccggatttggcttatggttttgaagaaaacgcttgtctcagatgtggtaaatgtgtttatgcctgtcctatgaaattgctgccgaataggcttgatgaggcggcgagagcagatgattttaaagcactggagaagttgaatattgcagattgtattgagtgtggaagctgcgcgttcagttgtccttcaaaacgcagacaggttcagcagataaaggtggcaaaagttaagcttcgtgccgcacagcaaagaaataaataaaggtggagggaataaatttggataatttacttgttgtttcacattccccgcatatatcaggtaatgatacggtcagaaaaacaatgcttgatgttataattgctttgattccggcattgcttgcaggggttttggtttttgggtatagggctgtggtcgtcactgttatcagtgttttggcatgcgtcttatttgagtggttatggaataagatattaaataaaccaactactgttggtgacttcagcgctattgtaacaggtatgcttttggcctttaatatgccggttacaattccgctttggatggttgttataggagcattttttgccattataattgttaagcaattttttggcggtcttggtcataattttatgaaccctgccctggctgcaagagcgtttttgctggcgtcgtgggcattagcgatgactacatgggttgctccgcatacagctgttccgctttggaatactgcggatgttgtgacatcagcgacaccgcttgcagcatatgcaggaaccgaaggagcttctcagcttccaagctattttaatttatttattggaaacgttggcggctgtattggagagacttcagctttggcaattttaatcggcggagcctatctccttattaaaaaagttataagattgagaatcccgcttgcatatcttttgacattagctcttggaacttggatatttgccggtccggatggattttttacaggagacgctttgtatcaagttcttgccggcggcgtaatgctgggagctttctttatggcaacggactatactactactccatatactcctgtcggtcaaattatttttggtatcggctgcggagtaataactgttttaatcagagtgtggggcggatatccggaaggctgctcatactcgattcttcttatgaatattgttacgcctttaattgacagaatcacagcaccaaaacgttatggtgcctcaagaaaaagaaaggaggcacaagtataatgaaagagacagctactcttactataaagttgcttttgataactgcgattgtggcagctctgcttggcggtgtaaatatggtaacatcacctataatcgctaaaaatactgaggctgcttttaatgagaatatgaaagaactgcttcctgaagcagataagtttgaaaaggacggtacaaaactgcctgaacctgaatccggtataactgttgacggtatatatgccggtatgctaaatgacggtactatagttggatatgtcgcaagtgctgtatgcggagaaggctacggcggtgatatagttgtgatggtaggaattgattcagaatgtaaggtaacaaaagctaaagttacggaaatgagtgaaaccccgggacttggagcaaaaagtcagtctgattggatagaccaatatacaggtttgggtcaggatatacaagttgataaaaatggaagcgctgcatcagcagaatacaaggttgaagctatatcaggcgcaactattacttcaaaagctgttacgaaagctgtaaacgcttctcttgacgccgcacgcgtggttattgaggataataatattccgccggctgaagaagtgcaaaataatgaaaatttggatcaaaatcaagtcgaggaaggtcagccaagtgctgaatctgaaacaatagattctgaagcagaagttagtcaggaagattctgaaactaatagagaagaaccggctgacagtgatgaagatgttgaagggggtgcggcagaatgaagcaaaatacatattttaaaactttcctgaatggattactttatgaaaatccttcgtttgtattatttctaggtatgtgtcctactcttgccgttacaaccggagttgttaacgctatcggaatgggtctttcaactacggcggttttgatttgttcgaatatcgttatatcgcttctgagaaagtttatacccgacaagataagaatagcggcttatatagttataatagccggtttcgtaacagttgttcaaatgcttatgaacgcttatgttcctgctctgtcaagcagtcttggaatttacattcctttgattgttgttaactgtataattttaggaagagctgaagcgtttgccaataaaaattctgttggtaaatcaatgtttgatggattaggtatgggtcttggttttacagccgctcttattttaatctcagcagtaagagaaattctaggagccggaacatttgccggtatttcattgtttggcagcggatttcagccggtttccattatgatacttcctccgggagcattcttgacgctaggttgtctgcttgcggtaattaatataattgttatgaaaaggaaaaagaaaaaaactgctctgaattcgtcagatgaaaaggagggcatataatatggttgcagatttattggtaatcagtataggcgctatacttataaataattttgtattagttcagtttttaggaatatgtcctttcctaggagtgtcaaaaaaggttgatacatctgttggtatggggtttgccgttgtgtttgttatggcatgcgcgtcaataataacatggtgtgttcaatattatttgttggttccgttccatctggaatatttacagacgatagcgtttattttagttatagctgtgcttgtgcagtttgttgagatgtttttgaaaaagtctattccgtctttatatagctcacttggcgtttatttgccgcttattactacaaactgtgcggtgcttggtgtagctatacaaaatataactaagttcggcggaacagatatgagttttttgaagtcggtggtttatggtgtttcagctggtattggattcaccatagctattgtattgtttgcaggtgtacgagagagattagaaagttcaaacgttcccaaattcctgaaaggtatgccgattacgctcgtaacggcggcgcttctttcgattgccttcctcggattttcgggattaagtttctaaaggaggggaaataaatggtttcaagtattcttatccctgtccttgttgtcggtggaatgggattaatttttggagttttacttggtgttgcttcaaaagtatttgctgtaaaagaggatgagcgtgttcctaaaattttagaggttctgccgggagcaaattgcggaggatgtggctttgcaggatgttcggcttatgcaactgctttgtgtaaaggcggagttaagaccaatatgtgtcctgtgggcggtgacgctgtttccgaaaagatttctgaaataatgggtgttaagaatgaagtaaaagaaaaaatggttgcccgtgttctatgtaacggaagtcctgaaagagccgttcaaaaatattattttgacggtccaagagattgttacagtgcttcgcgtcttggcggcggggaaaaaatgtgtgcttacggatgtttgggatttggctcttgcgttaaggtttgtaagttcggtgcaatgagcattaaggatggagtagcatatgttgatatagacaaatgtgttgcgtgcggagcctgtgcggaagaatgtccaaaaaagattattaaaatactgccgcttaaaagtaagtatactataacatgtaagagtgttgaaaaaggaaaaattaccagacgagactgtgcggttggttgtattggctgcggaatttgtgcaaaagcttgtccgaagggggctatatcaataagtgagcatttggcggttattgaccctaataaatgtgttaattgtggtatctgcgcacaaaaatgtccgcaaaaggctattaataaagttactccagctggattggttcgtcctgaaccaaaaccgtctaaacctaaattgacgccggaacaaatagaagctttgaaagctaaaaaagctgctgaaagaaaagacttaaatcagtctcccggcgaaagtgaaaagaatataaagtcaaaagttgttgatgcagatactaaattcaacgatgttgtaaagaataatattgatagagaagtaaaaataaaaagtggtgtgcaaatttctgatactcaggaaataaatgttaaagaatcgaatagaatataatcatggatttatattcaggaggtatatgtatgattgataataactgcgcatattgtgttgaaggcgagttagttgaaaagtttggaataaaaatatgtgaactcgaaacttgtaaggtatatttgtttaaagaacaaagtcatagaggaagagttatagcagctcataaaaaacatgttggtgatatgacggaacttactccggaagaaagatgctcatattttgaggatatagcaaaaatctcttctgctctcagaaaaatttttaatcctcaaaaaataaattatggggcatatggggataccggaagccatttgcattttcatctggttccaaaatatgaagatgaatacgagtggggtggagtgttcctaatgaatcctgatcgtgtgtatcttgacgatactgaatatgcagatatgataaatgaaataagagaagcactaaaagaagaggatgcaggttaaataaaatgcaattaagcagggtcttgtttgactctgcttaatttagactcggaggtgtgtttatgctttcaaaaattctctcaaaagaacagtgcgctgactgcggtttttgttgtgttttcagaagaaccagtatttgggaaactcctcttttttcaaagtcagttattgaaaaactcaaaacaaaatatcaagattctgaatttgttcgcgtaggtgatttatatactatagatttaagcaaagagtataaaactgattctgatgatgaggaagcagcttgtttttttcttgacaaaaaaagtggctgtatgcttaatgatgatgaaaagcctctggactgtaaaatatggcctcttagaataatgaaggatgctgaacatttagttattgctttgaccccaacttgcaaggagattaataaattgcctgttgaaacagttaaagagtttgtccagtcggggattggtgaatatattagagataaagctatggaaatgccagatattataaaggaatatagaagtgattttccggtaataatgacattttctgattagtatacaaatgaaaggtgatttaatgccaagtttagaatttaagaggattgaactttcagataaagaaatagttaataattttttaaataaaacaaattcgaattcatgtcaaatgacattcgcaaacttgttttgtcttcgtgaaaaatataatactgaaatatgcgttcgggataatgttttatttattcgtcagaagaatagaaattttggcggtgaaaataatcaaattgcatattttgttccgataccgataggaaccggaaatcttgagtctgccataaatttaattattgagatatcgaggaaagaagggcatagaccttatttttttgctgtgaccgatgatacgaaagatgaacttgaaaaattagataagtttgagttttgtatagaggagcaggaagattgggcagagtatatttataaaagtgaaaaacttgttgatttttcttcatcagacctttcaaaacagcgtagggcagtaaatcgtttttggaatctctatggagaggaaaccaggattgaaagaatcagcgaaagtaatataaaacaattattaaagtatcaaagcaaatggcttaaagaaaacatagagagaaacatggattctgattctttaataaaagaaaatgtttctatatgcaacgcgcttgaaaattttaatgagttagaccttgaaggaattataatatttgttggtaaatcaatcagaggctatggatacgggacaattttgcccggaggggcttttgatattatagcacagaaaggtgatataagttatcagcagatttataaggtagtattgcaggagcatgttaagacctattatgaaagagctgaattgactaatatggaggaagatataggtcttataggtttaagacgttcaaaaaccaggtatagacctgaatatatgttaaaaaaatatacagctttcttcaaataagtaattattatacaaaagacagggatagtatatatccctgtcttaattttgtttatatagaaaaatcttaataaatcaataaaatttatctttgtcaacattaagcccatacttctcgttatattttttgagctgctcttctttattcttttcaagttttatatcttcatgtatatcagctaccttttgggtaaccatttcgatttgatgtttttcctgcatatggtctacaagagttgtgttgtagactgggtcttcatagtgagctgcttggtatttataaacaagtttgagcaatactggtgtgattatcgtagtgaccaccacgacaattacaacgggagcaaagaactcctgaaccattaaaccaagagctgcacccttgctggcgacaatcagagcaacttcaccacgtgagatcattccaattcctatctttgtagactgtagattagtatatccgcacattttagcaccaacgccgcacccgactacttttgaaagtatagaaacaattaataagaaaaatgtgaaagcgattatagccggtcccattgagttaatggtaacttttaatccgacgctggcaaaaaatacaggagagagcaacataaaagacaccgtatcgaatctggaaattatatatgaagtccttttagttcctgataatataagcccggcaacgaaagctccagttatatctgaaacaccaaaaaatgcttcagagcaatatgccataagaagacaaaatacaaaactcaaaacgctgaaacggcgtaaatcttttttataaccattcatccaaggcctaacaaatttaaaaaacagataagcgacaataccacagaatgcaaagaaagctaaaattttaataagtacaatcggtagacttatagtcggatcagcacagctggttattattgtgagcgctataatacctaaaacgtcatcaataagtgccgctcctaaaatagcattacctgaatgggtagaaagcttgcctaattctttgagcgtttcaactgtgatacttaccgatgttgcagttaaaataacgccaataaaaatgttttgcagcagcgtattcgggtcacctgatttgttaaaaaagtaagctacaacccaaccgccaatcaaagggagaataacacccatcagtgctataaccgtagaggctacaccgcattttttcaattcttttatatcggtttcgagacctgcgctgaacattagaactatgacgccaagttcagatatagaagttataaaatccgtgctgtgaagccatccaaggcaagccggtcctaaaattaaacctgccagcaaagcaccgacaacctgaggcatttgtatttttcttgtgagcaaacctaataatttagtgcttaacaatataagcgctaaatcaatcaaatatccatattccataatccctaccatccttataaattcatattaaccccaaaataacattatagcttttattttataaaaatatattgatgcagaacacaaattgatttaagcaataatgcaccaagaactatgatactactttttttagtttttgtctacctatattttatcgttaatgtgtttttttttgctattatttttgttttgaaaatatcttggaatataatgtataatagtataaagatttgttatagtatatcaattataaaacttgttaattaatgattttattatttataggtaataattatattgtacaacataatcaaaaatctgcataatcataaatacatcatattgaaaagaccagcaaacgctggtctttttcgtatatttatgatgaaattatatgtgtaaaacaagagagatattattgttacagatcacggcaactacacattatatggtgtaaataatatgttaaaatattatgttaaaatattatgtataactcatcctcattgctccgcaagcggtcaaagccgttgtttttaccaaaattattttatattgtcaacaacctcaaagttatatgacaaatagctctgtcaaatagctttgaaaaatgaaactaattttatgtcataaattagtttttaagactatgtatcggtgcaggaatacgtccgccgcggttaataaatacttcactgctgtagttatgaacaggcataaccggagcttcaccgagcagtcctccaaattcaagagaatctccaacagttttaccggcagcaggtattattctgacagctgtggttttttggttaataactcctattgccatttcatctgcaataatcgcggaaattgttgacgccggcgtatctcctggtattgctatcatatccagacctaccgaacaaacacatgtcatagcttccagcttatctaaagttagagcaccgcattcagctgcggatatcatacctgcgtcttcactaaccggaataaacgcaccgctaagtccgccaacatagcttgatgccataactccgccttttttgaccgcgtcatttaatagtgcaagagcagcggtagtgccgtggcatccgcacttttcaagccccatttcttcaagaatataagctacgctatcgccaacctcaggtgttggagcaagtgataggtcaactattccataagaagagttaagcatctttgaagcttcgcgagctacaagctgacccattctcgttattttaaaagcagtcttttttatagtttcagatacagtgccaaagtcttcacctttgacttgctcaagtgctttttttactactccgggaccgcttacgcctacgtttataacagtatcgccctcacctacgccatgaaacgctccagccataaaaggattatcctcaacaggattggcgaaaacaacaaattttgcacagcccaaagagtcatcatcttttgacatgtcagacatctgtttgattatttctcccatctctttgactgcatccatattaataccggctttagttgttgcaactccgacagaagaacatacatattcagtggttgaaagagcttctggaattgattttatcaattttttatccgattcggtatatcccttatatacaagagcggaatatccgccgataaaattaactccgagttcttttgcagccttgtccaatgtttttgcaaactgaacatagttatcagttttgcttgctgcagcaaccaatgatattggtgtaactgatatacgtttatgtataatagggataccatatctcctgctgataatatttccggtttcgactaaatcttttgcacatctagtgattttatcgtagattttttgacatgctttgtcaggattctcgtctgcacaatctagtaatgatattcccatagttatagttctaatatctagatgttcatccctaatcatttttatggtttcggtaatctcatttgtatttaagtttatcatatgtatttcctttcggtggtttaaattctgtgcattgaattaaatatgtcttcatgttgaattctaatttcaactccaagttcttttcccaggccggcaagtttatcagacagttcgccgaaatctaatttggttgagcttacatcgacgagcattaccatggtgaaaatattttgcattattgtttggttaatatcgagaatattaatatcgttttcatagagcagactgctggttttcgcaattatacccgtcttgtctattcccataactgttaatactgctttcataatttttctccttaagtatataattataatttatcttatgtttagagtaatggtctaaagattttaaaccattactctaataaatatattatcattaaattttaaaaaagtacagtacaatattacatcaatttaaaattgctatacctatattaagatacaatgcaaaaatgcaccataataaatatggtatcagcatataagcagatgctttggatattctataaaatgctaaaatgtttaaaataatcagagcaattaatattgtaagccatacagctgaaaacgtgtgcagtccgaatacaaaaaataaaattgtccaagcaaagttaaaaaacagctgtaagccaaaaattaaatagcataatgatttcttaggctgcggagccgttgagttagcaattccatacagtgataaactcataagaaaatataaaaccgcccatactataggaaaaaccacacctggcggtgaaagcggaggcgatgcgagatttgcatattcttccatagcgttttttgtcaatatttctgataaaaaggcaactccaaatggtatcaaaaatgacaaaatgagttttttcaaatttaatgttttaaacatacaaccacctcatatagtttttagtatattgtatgtttattgttataattgtattcaaccgataaagctagtgaacaaaaaatacgtcttatattagaccataattttttaatccaacagttattccttcattcaacacggtttctgttacaaaacttgctatattttcaagttgctttgtgtgttttcccattgcaataccgtatccaacagttttcagcatatcatagtcattatcaccgtctccaaaggcatatgtatcatttaagtcaagtttaaagtgcttcattatttgatttatacccgaagcctttgaaatgttttgtttaaccaggtcgccggaaggattggaacggtgtttggttatattatatttatctccaaaattttcaattagtttgctgaataacttgtcaccgttatacgtaaacatcattttattcgcctgaactatatttatatcttccggcattgggaagaaacagttcatgctaatattaaaatggttcatcatttccataaaactttcataattatttttgctgtaatagcaggcgtcatgattttctgtaatataaccataattattttcatcaaaataacttattaattcagttaattcatttgttgtgagtttatcatttataatgtattctccgtttacagtggcacaagctccatttgatgtaatataacaatcaaagtcaattcctgtttcaggaacataacagcgtgctctgccggttgcaagaccaaccataaaattgttttcctgcagtttttgaatagaatctttagtagatttagtaggaataaagattttttcaccttcgtcaacaagggtaccatcgaagtcaaaaaataccgctcccctgtaattcttcataaatatatctccttatatcatgtttagtcgtaattcagcagactgaaatagatttacttaatctttaaatattctacctcaaactttaaatctttgcaatacattttttatataataggtaataaatctattaagaaaatttgcgcctattatgtatttatattgtataaaaatactatttataaaaatttttatatagtctgattttatataatttaagtaatatttttcttcgtattcttttttacaaatatgaaaaaataagtatggagggttattatgaaaacactaaaaaaatcattgacattaatatttataatttctttgttttgcatcacagcagaagcaaagacaatacagcatacggttgttaaaggcgaaagtatgtggaaaatagcggtaaaatatcaggtcggattaagtgagataatctcagctaatccccaagtatctaatcctgctttaatttatccgaatcaggttttaaatataccattgatggatgagtctataacttctttcgagcagcaggtaatagatttaacaaatgaaaaaagggcatcacgaggattaaaacctttgaatgctaattgggaattatcaagagtcgctcgttataaatctcaagatatggcaaataacaaatatttttctcataccagtcctacgtatggttcaccttttaatatgataaagaattttgggatcaaataccgttcagccggcgaaaatattgcttatggtcagcgtacaccggcacaggttgtaaacagctggtggaattcggcaggtcaccgagcaaatatgcttaacgctaattatactgatattggcgtaggctatgtagcaaatggaaactattggactcagatgtttatacaaaagtaggatattttagaaatctcagaaagaaattttaaaacatgtgtaaaagctctcagccgagggcttttaatttgtttgaaaatttagattataataatttatttgacataatatattatataatgctataatcataacatgaataaatttttgcctatttctaaaaaagatttagatttaagaggaattaagcagctggattttgtatatgtaatcggtgacgcatatgttgaccatccgagttttggacatgcaataatttctcgtgtacttgagcataatggatatactgtaggaataatttcacagccgtcatggaaaagctgtgatgatttcaaaatactgggaaagcccagattgggctttattgttatgtccggaaatattgatcccatggtaaacagatatactgtttcaaaaaaggtcagaaatacagatttatattctccgggcggaaaaggcggaatgagacctgatagggctacaatagtatattgtaataaaataagagaagcctttggcagtgttccgattattataggcggaatagaagcaagtttgagacgatttgctcattatgattattggagcaataaagtaagaagaagtattttaattgacagcggagctgacctgcttatatttggtatgggtgaaaggcaaatagttgaagtggccgaacttcttgacgctgaagttcctgtgagtgaaatcaaaggaattttgggaaccatgtatatagagaatgataaaaataatcttccgtatgatgcaatttcgcttccgggatttgatatggtttcaaatgataaaaaatcttatgctgcagcaacaaaaattcaatatgaagaacaggacgctgtcagaggaaaacctttagttcagctcgacaatgacagatatattgtgcaaaatccgcctgctgctcctttatccactgaagaacttgacgatgtatatgctttgccatatatgcgcacttatcatccgatatataaaaaacagggcggagttcctgcgattaatgaagtagagttttctattacttcatgccgcgggtgttttggaggctgcaatttttgcgctttgacctttcatcaaggaagaaccgtaactgcacgaagtcatgagtcaataataaacgaggttgaactgttaacagaattaaagaattttaaaggttatattcacgatgtcggcggaccgactgcaaattttagattcccttcatgcgaggaacaacttcagagaggtgtgtgtaaaaataaacagtgtcttttcccgcagccttgtaaaaatctagttgttgaccattctgattatattgagctgcttagaaagcttagaaagttacctaagattaaaaaagtttttattcgcagcggtataagatttgattacttaatgtcagataaaaatgatagttttttatatgaattatcaaaatatcatataagcggacaattaaaggttgctcctgaacacatttcagataatgttttgaaatatatgggtaaacctaagcatgaagtttttgaaaaattttccgctaagtataaaaaaataaacgaagagttaagtaaagaacaatttttggtaccttatttaatgtcatcgcatccaggcagcactttaaaagacgcagttaagttagcggaatatcttagagatacaggacataatccagaacaggtgcaggatttttatccaacgcccggaagtatatctacttgtatgtattataccggtatcgaccctaggactatgacagaagtttatgttccaaaaacatatgaagagaagcaaatgcaaagagcacttctccaatatagaaaccctaaaaattataatttggttttgaaagccttaaaaaaggcaggcagggaagatttaattggatttgattccaaatgtttaattaaaccgttaggaaataaaaaaatatataaacctgatacaaagaggagaggataataatggcaaagatattgagcggtaaaattgtttctgcccgtgtaaaagatgagcttaaaaaagaggtggaagaactatcacagcgtggaaaacaaacaggacttgctgttgttcttgttggggatgattctgcttcaaaagtttatgtcagaaataaggaaaaagcttgtgaagaggtaggaatttattcagaagttcataggttgtctgcaaatacatcggaagaagaacttttaaaacttataaatgaattaaatgaaaatgataaaattgatggaatactagttcagcttccattgccaaaacatcttgatgataaggttataattgataatattaaacctgaaaaagatgttgatgcttttcatccaagtaatgttggtaaaataatgattggagattacgactttttgccttgtactcctgccggaattatggaattaatacatgaaagcggagttgaagttgacggaaagacatgtgttgttataggaagaagcaacatagtcggaaagccaatgtcaatgctgcttttacatgaaaacggtactgttacaacatgccattctcatacaaaaaatttagctgaagttacaaaaagtgctgacattcttgtggcagctgtaggtattcctaaatttgtaaaagccgatatggtaaaacccggtgcggtagtcattgatgtcggaatggatagagacgaaaatggaaagttgtgcggcgatgttgattttaatgaggttgagcctgttgcaggagcaattactccggttcccggaggagttggacctatgacaatagctatgcttatgagaaataccgttacggcttcaaaaaagaaattagaaaaataaaaatgaaacagggaagactttttgtcttccctgttaaaattttgaaattaaaaattgaattatataaataattattttaaggtataagctcataagagcatatcctcccaatgttcctgtaataaatcttctgatattgttacattttattatgtttttagattgtaaaaaccaatctaaaaacattgccaaacaaaataatattacaataaatatatttggtttataaaaaaatattaaacaaatagcggcaatccaaccaaagaatacgccggtacatctagaacatacaggaaactgaaatccattgataaaaaaacttctttcaggtatttgatgacattttgtcagccttcctaaattcatgagttttaaccaaagcttatttgaatcaaaatttttatccattaaaacgtcttccgcaatttctgcaaatccaataggtgcggttagttgacgtagttccgctgttacaagctccgcataaaagacccaaaggaccaaacaaaatatatccgcagcatccgcttccggggtcgtatcctccgccggaaactttagtttctgtcattggctgacaattattacttccgcaatgaggacactttatgcctgaataaccatttgcttgttcattatttgaagcatttttagtacctcctacaacttctgcatcatattcaggcacactggcaggttgtccgcaatttgggcagaaagttgagttgcccaaatccgttccgcattttttgcaatacataaatttcactcctaaatctacatcaaggctttactaaatgttattgaatctcatctaaattatatggtgttgtttggtatacaaaataattcagccaatttgaatataataagtttgcgtgagaacgccacatcataagaggttcttttaatggatcattatccggaaaataattttttggcaaattaatatcaatacctttggctttatccctaaaatattcatttgctaatgtaatattatcatactcagagtgtccggtaacgaaaaattgacgtccgcttttagctgatactatgtaaacgccggcttcgtcagattttgataaaatttctagctctggaaccttaacaatatcagattctctggtttctgtatgtctggaatgaggggcataaaacttatcgtcaaatcctcttagaagtatcttatgttttttttcaggaagcacatagtgttcaaaaatgccaaaaagtttatccttcatttcatattttggtatcccataatggtaataaaggccggcttgagcgccccagcaaatatgaaaagttgatgtaacatttttcttcgaccattccatgatttcgcaaagctcatcccaataatctacttcttcgaaatccatctgctccacaggtgcgcctgtaattatcaaaccgtcaaattttttgtctttaaatttatcaaacgtatcataaaatgtttcaatatgactttttggtgtattttttgattcatagctttttgtgtgcataaaactaatattaatttgaagcggcgtatttccaagaaccctgagaagttgagtttcagtttctatttttttaggcatcaggtttaatattactatttcaagaggtcttatttcttgcttaagagctctagtctctgtcattacgaatatattctcactgttaagagttccggttgccggaagagtatctgtaacttttatcggcatatttctcaccaccatttattttgtattctcgattataacatataaatttatactagtaaagcaattttatattaataattttataaataagcagaatgattttataataagcagatttaaaatattatttactttattttataatacagatttattattctaacaaaatatataaaatattagatataatataaaaaactaaagagtaacatatagattttatattgaaatattttcagtttgtttttaatgtatatttcaagtctttatatttatataaatataattatgataatattgtcatgcgtattttttattgttaaatttaaataactatttgctaaatatgtattatgtaaaatttttaataacagttactttttatgtaataaaatatataattactattaaatttctacagataggtgtttgttatttaaaataaagaacagctaaataatatgatacggttttaattatatattaaacaaggtgaaacatgataattttctagtttgattttaaaatacatttatgataaaatatgttattattagactgtttaaatattaaattttaaggaggattaaaatatgaaaattgctgttttatatcaaaagaatagtccgcctgttatcaaaggaataaaaaaaccgatgaaggaaggcggatacagcgacagcggagcggatatttgctattgtcttcaaaaacataatattgatgttgtgactcctgttaaacatcctgatatgctaaaggattttgattgggtttttccggatactaaggaaggaatacagaatgcaatttctttgggtgcagacacaatatggttaaatacagttttgtataacaatcatccgattgaaagttttaacggtattaatattataggtcagcgtccgtcagatgtgtcaaaatatgatgataagtactatacaaataattatttgagaaatttgggatttccggtagtaaagggtgttttgcttaataaagagagtaaatataacggagattttccttgtgtgataaaacccgttcgcggcagaggaagccagggagttgtgaaatgctgttcagctgaagaactttacagtgctttaaaaaacctgattgatagtggaatctatggggatgaaatgattgttgagccgtttttagatggaaaagaaattactatttctgttttaccaaatggcacatgtttgccggttgttgaaagatttaaccattgcaatggtatagctccatataatggcgttgttgcggtttctaaaaatagccgggccattttaaaaaataatgaaagtttaaacaaaatttctaaagcctgttcaaaagctgttatttcaatggatttaaaagctttagtaagaattgactgcagggagaacatccatggagaatatgagatgtttgattttaatttgaaacctaatatgaccggagcggttagacctcacagattagaccaggatagtcttacaatgattgccgcctcggctgttggctggtcgttttatgatttactaaatgagttaatacaaacaaaatggcagttataattaatgttttaattttatacatataataaagtgtttttatacattttgtaaataacttgggtaaatcgtaaaataatataaatatcaaagaaaatattaaattgttaaattgaacaaattatttttaacttaaaaatatgaatttatgcagttatacaagattggataaaatcattaaatttcaaataaaaactagtataatttcaaaatttctacttgacttatcttgaaaactcttgtattatagtaatgacaactgtaaagtctcagttaattttttgcattaaaaggagcggtattatgtacatgaaagaggtagtagttcagaatcaggttggactccatgcgagaccggcaactttctttatacagaaggccaatgaatttaagtccagtatttgggttgagagtgaagatagaaaggttaacgcaaaaagtctgctgggtgttctttcgctcggtattactaaaggtcttacgatcaccataattgctgatggtccggatgaggaagacgctgttaataacttggttgatttgatttcttataattttgcataaaccgtttggttaaaatatactaaaatttgagtgaactgttttcacagtttactcttttttgatacataaaataaaatgtggggtgatattaatgacagaagatattatgtgtagaataaaagaaaaattaaaaactcttccaatgtcacctggcgtgtatttaatgaaggataaggacggaaaaataatttatgtcggaaaaagcaaggttcttaaaagcagggtcagctcatattttataaattcgaaaagccatactgtcaaaactgttaaaatggtgaatcaggtcaatgattttgactatatattaactgacagtgaggttgaggcgcttatacttgaatgtaacttaataaaaaagtatatgccgaaatataacatactcttaaaagatgataaacaatatccgtatattaaaataactgtaaaagaagattatccaaaaatatttgttacaagaagacttgtaaaagacggttcaaagtatttcggtccatatatgagcgccgccaatacaaaagaaactcttgacacgattaaaagaatttttaaaataagaacttgcaatagggttctgcccagggatataggaaaagacaggccatgtctttattatcagattggtcagtgcagcgctccgtgtgcaggaaaaatttctcaggaagaatattctgaaatgtttaataaaatttcagatgttttaagcggcaactattcaatgttagaaaaagcattgactgagaaaatgtacaaagcttcagataatttagaatacgaaaaggcggcaggttatagggacagaattaataatctaagagcacttgatgaaaagcagaaaataatatctacaaatgaggataaccgagatattattggcgtgtacagagagaataacgactgctgtgttcagattttttatatgcgaggcggaaaaatgcttggttccgagcactatgtttttgaaaatagtgacgatacattggaagaacttatttcgggatttataaaacaattttattttacggcaacaaatatacctaaagaaattttgattcccgtagagatagaagattctgaagaaatagagaaatggctatctgaaaagagcggacataaaatacgggttcatatgccaaaacgcggggataaagcgcatactattacaatggttaataaaaatgctgaggaatctttaaaagttcataaatttaaaagggacagggagcaaacaaatcaaaatgctgtattaaaaggactaatggaattgcttaagcttaaaagcacaccttttagaattgaaagttatgatatttctaatatttccggttctcaaagcgtaggtgtttgtgttgtgtataataatgcgcgtcctcataaatcttcatatagaaagtttaacataaaaacagtggagggagcaaatgactacgaaagtacaagagaggttatatttcgcaggatatctaaagcatatgaggaagaggacgcaataaaatcaggaactctgcaagatgataaagcaaaatttctgccgcttcctgatttaattttattagacggcggcaaagggcatgtccacgtaataaaagaactgtttgaaaccatgggagaagaaattccagtatatggtatggttaaggatgataaacacagaaccagagcgctaactgatgaaaatcaagaattttatattgataaagacagcgagttatttaagtttcttacgggtcttcaggaggaagtacataggtttgcgattactgcctttagaaaaaaacatgaaaaagccagcgttcacagtgaacttgatgatataaaaggagttggtccggcaaagagaaataagcttctattaagtttttcatctattaaaaaaattaagaatgctacagtcggagagttatccgctgttatagaccctcaaacagcaaggaatgtatataaatattttcatcctgaaaattaaaaataaataaaaggctaagtaattttgtaaaccgaacaagcatataaatcagtgaggagttgatttatatgtcttttgacttaagaagtattatcgtttacatattcggtctttttttattttttatgtgtattaagttattcaaaaaaccgctgatttggatttttaggctgatgattagctgtattattggtattggaatacttctgctgtttaatttaatatttcaaaaagccggttttactttggctctaaatccgtttaatgcggttacaataggtgtattaggggttccggggcttgttttgctatgcgtgttgtcatgtttagcatagcagcggtattgcgttaaaagtcacgtagattttcataacttattaagtccagcatttgttcaagagtatcgcattgattgataagatttctcagttttgctccgccgcacaaacctttaaaataccatgccatatgttttcttccctcaagaacgccgcggtgttcgcctttaaatttcactaaaagccggagatgtttttcggcaatgtcagaacgttcctcaagtgtaggcggagcaagttcatcaccggttttcagataatgaagcacagaactaaacaaccaagggtttccctgagctgctctgcctatcattataccgtcgcatccggtataatcaagcatatattttgcggatttgccgtcatgtacatctccgttgcctattaccggtatttttacagcttcttttactttttttattatttcaagattcgctttgccggaataaaattgtgctctggttcttccgtgtattgttattgcgtcagcgccgttgttttctgctgtttttgcaaactcaactgcgtttatactgtcatcgtcccagcccatcctgaattttactgacataggacaattgacggattttcttactgcactgataattttacctgccagttcaggatttttcattaatgcactgccgtcaccgttatttacaatcttaggtgccggacaacccatattaatatctatcatgtctgccccgaattcaagtgagcgttcagcaatttctgacattacttcaggttcgtgcccaaaaatctgagcggcggtaggtttttcaaaattcaaaacttccagcaaaacctcagtccttttatttttatacagaagcccctttccggataccatttccgtatacatcaaagcaggaccgaacggctttgttatgagcctaaacgctttgtccgtcactccggccattggtgcaagtattatattgtttttaagatttaaagttcctattttcatatcgtttctccttgcggatattatacactatatattgtgatttgccaatatgaaatattgacataaagagacattattgatataatacccgggttagattttaacaattatgaagaatgaaatttaagggttgattattttgaaaacaaaaagaatagtaataaaggttggaacttctacgcttacccatgaaagcggaaaattaaatctggagagaatagagaagttggttcgtgttatctcaaatattaaaaatatgggtcatgaagtaatattggtctcaagcggcgctattggcgtcggagcagggaaagtaggtttgaaagagaagcctgattcagtcagaatgaaacaagccctggctgctataggtcaggcaagtttggtttctatttatgataaaatctttaaagaatacggatacagcaccggtcaggttcttttaacaaagtttatccttgatgaggaaactagatataacagcgctcgcagggcttttgacgctatgatttcatttggcgttgttcctatagtaaatgagaacgatgtgatatctacttatgagatagagtttggcgacaatgatacgttatcagctacagtagccgaacttgtcagagccgacctcttaataattctttcagatattgacggattttacgacagcgacccgaggaaaaataaagatgcaaaaattattcctgtagtgtctgaaatatctgaggagattatgtcgtgtgcaggagcggaaggttccagccgaggaacaggcggtatgaaaacaaaattaagggctgctaagtttgtgaatgataatggtatagatatggttttattaaatggaaatgttcctgaaaagatctatagagttttagaaggcgagaatatcggaacattatttaaacacaaagaaaaataattacaaataatatattggaactttttccatttttttacgtctaaatactataatatctatcgggaggtatttttgtgcgtaaaaaaatatatggtttgttttttccaaaacttattattgctttgctggtactggctgttatagcggtttggagcagtgatttgttttctgataataaatataatgatgtatgtgcagataatgagtattatgggcagtattctttgtcatatatgccaatttatcttgacggatatgaaattcaagggtattactgcgatgaaaaagtcttaatttctattgatgatatgactagatatggttttgaattaaattatgactcagagaaaaatgtgcttaatttaaggtcaacatctgaaattgctgtatatccatataaacaatcaatagctgtttcaaattacatagctgagccgtccagttttgatgtgcggataaatggtataaaaatatacgcttattgtcttgatggatatgcgtgtgtcagcgttgatgatttggtttatttaagtgatgaatataatatacaaaccggttggtctgattacaatatgtgcggcggttatgacgcttctgccaacgcttttaatataaactgttttaggtttaaggttaatgattgggctgaactgcttgctcaaatggaaagcaaagtaaatcagactgagatagacatatatactgaaggaaagcctgaagaagcaacatattacggagctaagctggaacccagaagcggtatatatgcaggtatagtcagcgacggcaacggaaatcccgaagacggttcgccggaaacatttcatcatgattttggagtgtattcatcatatttagaatttgatgattttcaaacccagcttaataagcccagcagttatattgtcccggagaaaaactgtataagccaggttccctggaatgttgtggatattaatttggttttggacagtgcaaacgatgaatacattaaagaaacattagataatatggctaaatataataagccgacaataatacgttttggcgcggaaatgaatataggatacctgggggattctcctacagcatatataaaagcttttagaaagattgcggatatggtacatgagtatccaaatttcgctgttatgtggtcgccgaatgacaatggttccctggacagaccgtttggatatttttatccaggagatgaatatgtagattggataggagtgtcatcatttttaaagaaagattttttaaacagcctggctgttgaagatggttctgaggtatgtactacgcgcgaatctcagatatactttaccttaggtgattttggctatacaacgaattcacttaaatatataactgattttatgaaagaaaataatattaataagccgcttgccataagcgagggcggtgttgtctctcgaatctcttacagtgatgaaaacatagatttgtggggagaaaagcgggtcagaaatatgtattggtatgcagctatgagattcccgcagctaaaaagtattgtatattttaatcaagatatgaaatcagaagttataggatttgacctttcatttaaacctaactacacgcaaattatagaagaagctattacaaccggtccatatctgctgtcatataatgaaactcctaaatatacatttgttaaagcggacggcggaagaacttataacagcgattatattccgatatacggatatgtctatcagccggaacagtatacgaattatgtagagtattatatagacggaaatcttttggatacgaaaacagaaattccttataaaacatatttgaataaaaattctgtttctgacggaactcatactttaactataactgctcacggtgcagcgtcagaaatatcaaaatcttatacattagtaaaagaagcagggaatatagtaatctattaataattataaaaaaaataactcgttgtgttaaggcaacgggttatttttaatgtataagatttaaattaattttacttaaaccgaagtgttattaataagctttattatttatatttgtgacagttcataaagtttgtcaaaaacaatttcgcggtcccagatttttaccgctttttctatattattaattccgtttctgtttttcgccagcggaagttttgaagtagattttgcgttatgaaggagttcctgtccttttttattaaaattcaatattttaatatattgaggtggtgttacagcgtcttcttttgttattcccaaaaatatattcattatgattcgtctaatcctgctgtgtgcataacgttttgattttatattatcacataattcagaaaaggtttttgaagaaaatgctgactttttaattttattctctaatccctcagagacgtcaggagtattccgaatcgcattgatgtccgattttattatatttgatattatagcagtatctagcttttcaatcctgtggagagatgaatttttgtataatgaaatacagttttcaggaaccgctttaatcatatttgagccatgaatatttaatatattccttatagcgcttgcgctggctatctcgccatgaataacggtatcattatgctccgactcatatctctttattaaaataggttcaatattactgtttaatttgtataatgctttgacatattcaatagcaagaatattattgggttcacttaaaatattagcatagctgtttcctaaaattctgtacacagcgttttttcttgctaaaaaaaacgactttcctgactgaagttctgattttagaatcattttaaattcttttggttcagtgtatagcaatgaagcagttttttgtatttctgttatttcagaatgttcggcgccgaaagctatgctgtcaataagccccaaagaatgtaaaatataaattgaattaaacgcaaaaatttcagccgactgcattgaatgaacagcaggcagttctaacactagatccattcctgattgaacagccgccaaggcacggacagatttatcatacacagccacatcgccgcgctgtgtatagtttccgctcattataccgacaacagcgtcaaaacctaaattttgttttatatagtcaatctgatatttatgaccattgtgaaatgggttatattcacacacgattccgcagactttcaattattattcctccaacataaaagagcaatttttataaaatataaactaaataaaattatatcctactaatgtttatatgtcaatataggctattttatttcagaaaagctgttttatttaaaattttaatgtaataatttaaaaaactggttataagtattaaaaaaactatggtttatagcaaaattttttatatttaatacttgaaatcgactttttataggtgtataatgtaacagctgagtatcaaaaattaccatataaactggaatttttggcttattatgattttgtaaaataattatcaatatacacataggaaatgaggtttaacaaatgtcaaaattcatggacaagattaaggaaactgccagggcggataagaagactattgttcttgctgagggagaggaacgcagaacgattgacgcagcagcccaaattttaaaagaaggatatgccaatatcatacttttaggcaatgagtctaaaataaaaagtatggcggatggacttgatatttctgaggcaactattattgaccctgacacaagcgaacttacagaagagcttggaaacggactttatgagcttagaaagaaaaagggtatgctgccggctcaggctgctgagaaagtaaaagacgtattgtattttggctgtatgctggttaaaacaggcagagcagacggtatggttgccggcgctgttcacgctacagccgacgtaatgagatcgtcattgcagacaattaagactgctcctgacactaaagttgtttcagcatttttcttaatgatggttcctgattgtgaatatggaaataatggaacatttgtattttctgactgcggacttaacgaatatccggattcagaaaagctggctgaaatagctatttcttcttcaaagtcctataagagtcttgtaggcggagagccaaaggttgctatgctttcatattcaacttacggaagcgctaaatcagaacaggttgatttggttaagaacgcagctgataaggctaaagaattagctcctgacttaaagcttgacggagaacttcagcttgacgcggctatcgttccaagcgttgcttctttgaaagctcctgacagcgatgttgcaggtcaggcaaacgttttgattttcccgaatcttgacgccggaaacattggctataagctggttcagcgtttggcaaaagctgaagcatacggaccaatgactcagggaatggcaaaaccggtaaacgacttatcaagaggctgcagtgcagaagatattgccggagttgttgctattacatgtgtacaggctcaaaatcaggattaattatattatcggagggtgtaaaataaatgaaagttttagttattaacgcaggtagttcatcacttaaatatcagcttatcgaaacagaatcggaaaaagttttggctaaaggcttgtgcgaaagaattggtcttgaaggttcaaagcttacacatagccctgagggaaaagaaaaatatgttgaagaaaaaccgatgccaacccacaagactgctgttcaaatggttttggacgcacttgttgatgaagagcatggagttattgcagacataaatgatatttccgctgttggtcacagagttctccatggcggacagtattacagcgactcagttgttgttaacgatgatgttaaaaaggtaatcaaagattgtttcccattgggacctcttcataatccggcaaaccttattggtattgaggcatgtgaggacgctatggccggaactcctcaggttgcggtttttgatacagcatttgggcagagtatggagcctaaggcgtatatgtatgctataccatataaatattacgagaagtatagtattagaaaatatggtttccacggtacaagtcataagtttgtttccggcagagcaattaaattcggggaattagataacagcaactgcaaagtaattgtgtgtcatttgggcaatggcgccagtatttctgcttctgtcggcggaaagtgtgttgacacaagcatgggtcttactcctcttgaaggtttgataatgggaaccagaagcggtgacattgacccggctgttgtacagtatattgccaataatgaaaatttgtcggttgatgaagttttgaatatattgaataaggagtccggtgttttaggtatctccggcgtatcgagcgactttcgcgatttgtcagccgcagcacaggaaggcaataaaagagcacagatagctcttgacgcgtttatttaccgcgttgcaaaatatgttggttcatatgttgcagctatgaacggtgttgacgcaatagcgtttaccggaggaataggtgagaacgactgtgatactagatataaaatttgtcagtatttaggatatcttggcataaagattgatgaggaaaagaataaggagagaggtaaggaaatctacatttcaactcctgattcaaacgtaaaagttatggttattcctacaaatgaagagcttgcaatcgcacgtgagactttggatttagtaaaataattcacttattggttaaggctgtctcgattgagacagccttgcttttaaaaatgaggttgatattatatggctttaaactattatgaaaatatgactgatgaagaaatagtgtctttagcggaaaaggataggtctgctgaggagttcttgctgaataagtataaaaacctggtcaagtctagagctaaaatgtattttttggcgggtggagataacgatgatttgatgcaggagggcatgataggcttatttaaggctatacacgattataattcggataagcaggcttcgttttatagttttgctgaactttgcgtcaaacgtcaaattttcactgctataaagacggcagcaaggcagaaacatcagccccttaatacgtatatatctttaaataaacctgtgtatgaggacgtctctgagagaactttagttgaaaccttggcagaaagggaatctgtggaccctgaaaagctttatataatgcatgaaaaattaaaagatatagagaaagaaatagatgaaaagttgagtgatttagaaaaaagagtgttgattttacatcttcagggtatgtcgtatcaggaaatttctgaaattattaataagcctacaaaatcaattgataatgcacttcaaagaattaaaaaaaagctggatgaaaagtaaaaaaattgtagagcaaaatatctgtagtaattttcaaaaatttatttataaattataatttttttgaaattttacacttttattttattatacttttctttaaaatttaaataaatttgtgttaagaaatattattatccacttttagaatatcccgtaaaatcagttatcaacagagttattcacattatccaccgtttttatatagtaaaaataactaaaatcactgatttttaaaagttatccacaatttgcgtttttacgggcaagtccctcacttaaataaaaaattttgtttaaatttatttttatattttatattcacaattatttaaattattgaaaaatacagatatattgttctttttaatgttgttttttgtctactgagaaagatattattttaaattaaaccagttttttcataaaataccttgaactttgcaagactttaatatataatatcttaagttatattttttaagttaattatgttaattattatttttatatagaggagtatagtatgaatatttataagttatctgaactgacatctgaaaagagagaattcataatgaaacgcgctgaatctgacatttctgaacaaatgaagattgctaaagaagtttcggatgatattagaaagcgcggggatgaagcagttttagaatataccgctaaatttgaccatgtaactcttagcgcggatgaaatgaaggtaaaacctgaagagattgaggcaggttatgagcgcttggatgcagaaactagagaagcaattgaatatgccgttaaaaatattagaaattttcattcaaagcaaatgcctgaagagatgtggtttactgaagtggataagggtcttttggttggtgaaaaaactactcctatcgtagatgtttgtctttatgttccgcggggcaagggaagcttcccgtctgttttatgtatgttggctacacctgctgttgttgccggcgtagaaaaaattgtagttgttacaccgcctaatgaggaaggaaatgttgatgacgcaattcttgcggccgctaaaataatcggcgttagtgaaatatataaggtcggaggaattcaggcagtcgcttctgttgcatacggaaccgaaactattccaaaatgccataagataataggacccggaaacgcttatgctacagcagcaaaaagagttttgtccaactatattgattcaggtttgccggcaggaccaagcgaatgtataatacttgctgatgaaaacgccgaccctgaaaaggtggctttggattggatgattgaagcagagcatggaccggattccgctgcacttttagttactaattgtgaagagttggtttataaagcggctgaaattgttgaaagacagctcgaaaaaatatctgataaaagacgtgagtttgtaactacgaatttcaatacatacggcggagctattataactgaaagtcttgaagagagtattgattttgtaaatgactatgcaccggaacatatggaagttatgacaaaggaaccgtttgtggttcttcccaaaataaaaaatgcgggagaaattctgctgggagattatactccggtcacattgtgtaattttgttttaggtccgaatgctattttgcctaccgggcagtttgctaaaacctattcaagcgtttctgttatggacttcttaaagcgttcttcggttggttacgcaagccgcgacggctttgaaatggttagggattatgcctataagattgcaactgtagagggctttgatacccacgctttagcagttaaagagagaaaataaaattgagcgtacgcgaggattttactatgaaaaatagaattactgtaaagagaaaaactactgaaacttcaattgaggtagtaatagaaaaaggtgagctaaagcctgactatagaaaatatattaaaacgccgctgccatttttgaatcatatgattgagcatattgcgtggcgcgcatcacttaatatcagcattgatatggattttgacgaatttgaactttgccatttggtgtgtgaagatgttggaatgacgcttggaaaagctgtcggggaatatataaatataaattctccatcaggttatggttttgcgacggggattattgatgaagcgtgtgcagatgcggcaatttcatttgaggacaggtcgcagcttacgtttcaaaaatcaataaattattgtgagaatgttgaagggatgccaagcgaagagcttattacttttcttgaaggatttgctcagggagcaagatgtactctgtttattgatttaaaatccggtcagaacggccatcatatttgggaagcagttttcagaggtgttggaatcgctctcggtcaagctttgtcatttgattcttccagagaagggttaacctccggcgttgcaggaaaggtagaatatgaagtttcagccgaataattttgacaagataatatttgatatggatggggttgtaacaagcgaatatatttattgggatgcggcggctttaacggtatatgagcttttatacagccataaattctatggattgagtgagatagaccataattggtgttacggcaactttaaagagcttcacaaaataattttttgcggagataaaactataaaagccgtgaaagcattaggagtaaatacaaattgggatttagcttatatagttttttgtgtttcaaaatatctggagccggatttgacagaattcaacgaatggcattttgagtcagttcgtatgtttattgaaaatatcacggttcaggctcctgaggtctacaatctcgtgggtgaacttgctgctgtatctttaaatagtgagttttccgattttaagcgaggcaggagcaagttatgggatgatgttattaactgttttcaattatggtttttaggaggggaatctgtccccggtcttaatactatggaaaaacctttggtagatttgaatgatttaaaaaagacttttttagatttaaagagcaagggaattagtttggggataggaaccgggcgtccaaaagatgaaattttgtttcctctgaaaaagtggggattaatggaattcttttctgacaatatgattgttacatatgacgacgtattaaaagcggaagaagattttaaacccgaaactcctttgtcaaaaccgaacccgtttgtgtttttaaaagcggcttttagaaatgaactggatgatgagaaattaatatccggtaattatgataaagagagatgtttaaaaattgctgtagttggagacgcgccaagcgatttgatggcggcaaaatcagcaggtatggtttttgtaggtgttcttaccggtattgataggaaatctgctaatgaatattttttaagccataatgctgattatatatttgaagatgtaacacaacttattgacgattaaatatttttgtggggattattatgcaaataaaaattgaaacaccattaacaagtgaaaaggtaaaatctttaaaaagcggagataccgttctcataaccggagaaatttatacagccagagacgcggctcataaaagaatgattgacgccttgaaaagcggagaaaaactcccttttgaaatagaaaataaaataatttattatgctggtccaacgcctgcaaaaccaggtcaggttattggttcgtgcggtcctactacaagcggaagaatggacgcgtatgctcctgaattgataaaattaggtcttaccgggatgataggcaagggtgaaaggtcagacgatgttgttaatgcaatgaaagagtatggagccgtatatttcggagctataggcggtgccggcgctttaatagcgaaaagtattaaagctgcagagataatagcttatgaagaccttgggactgaggctgtcagaaaacttactgtagagaactttcctgctattgttattatagattctaatggtaaaaatttatatcatgatagataataaaaaataccggtatgaaaaccggtatttttttaatttttatcaaatattttattcatcatatttttaatattttcttttcttaaagatgtttcatctctgtcaattgttatattaattacatcgccttcacgggcttcgggcggaatcaattcaaccggcatatcggcaaaccctgaaccttcatcaaattctacaactgcaaagtttccttcaaatctatcaataattattttcatttaaaatatctcctttaatattctctatatacattattgccatcgcttgcaaaaattattgttccgtcagtatcagttctgaatgtctttatacccatattgtttaaagtatttaaagtttgttctgtaggatgaccgtatttattatctgcgccgcaggatataaccgcaaacgtcggatttaccttgcttagaaacgcttgctgactggatgaagaagaaccatgatgtccaatcttaatgacgttagcccaaagagattcaatgttatagtttgataatatttcattttcagattcaatctctgcgtcacccataaacaaaaacgctgtgtttccaaatgctattcttattacggcagaataattgtttaaatctttatattcgttactgcttggagccagtataaaagctgacattgtattttcattgaatattgtaactccggatttagcttcaactacatttatatttttctctattatagtgcttaagaattgctcatatgttttggtagtggttacggcgtttggcatatataatgttccgatttcaaaattgttcagaacttcattcataccaccaatatggtctgcgtgaggatgagttgcaaccaaataatcaattttattatatcctaaattttttataaaactgcatatttcttcgccgtatttagaagttgacgcgtcaatcagcattgtttttccgttaggaagcaaaacaaattcgctgtcaccttgaccaatatttaaataatacacttttacaaacgaattgccaagcgcaacatcgcttggcaactcttcattgttattattgactgaatccacatatgctgtattatcattaggaaaagctctgtatagtattgcagcaacttcgcatcgtattatagggtctccgccttgaaatgttccttcttgagtacctgttatataaccttgtttaacagcttctgctatataaggacgatcttgtttaggaatggtattataatcgtaaaacacatctgataacaagctgtcatcaacaggataatattcggaaaggtcataattcataactttcattaaagcaactgttacgtcctcacgggtagcattatcccaaggcttgaaatacagtcttgaatctcccggagatgtgctttggtatccaggcatttgctgagttattgaattgatataaggaaaagaccagtcattaacatcaacgtctgcatatgggcttgtgcgttttgtggaaagtttaagtccggacgcattaacaagcattttggcatattcacatctggcaacatagttctgaggtaaaaaagttccgtctccataaccggaaataattccgcgtgattcaagatttgttatgtaaggcgccgcccaaaagtcatcaggcacatcataaaacgatgttgcatatgctgagaaactgccgaaacacataagtaacgtcaaaactgcaatagtgacagaccatgtaactctttttcttaacattacaaattctcctttttcgtttaacaatataaatattatctaaatacaatttcaagcaaggattatatcattagtcttattatttgtcaagttttacggaaaaatggagttataataagactattaaatattttatattataatatgactgattcaacaagacaaaagttcctgtatcagccaaaattatttattgctgttgcaaaaaataacatatataaacaaagtaaagtgttataaaataaaaaatttaagtttgatattttttgttttatactttggttatagataaaagtatattgtttagaaacaaattaatttttatttgtctttattctcattattttatataagaataaaattaatttccgtacccaatacttatctcgttaaatatgtgtaggtaatcatcaatactttttttgtttttttcttctgatttgacatccaaaactattttaccttcatgcatcattatagttctgtctccgtatgtcacagcgtgtttaagattatgagtaaccataagagtagtaatatttttttcatctactactttttgcgtaagattcataatagtgtcgcttgatttggggtcaagcgccgctgtatgttcgtccaaaagcagtaaatcaggttttgataatgttgccataatcattgacagagcttgtctctgacctcctgaaagagaacctgccaatgtatccaatctgttctcaagtcccatacccaataattcaagctgttctttataatatttttcgcgcttatgatttaaaccccaagataacccaaatgattttcctttgttatcagctattgacagattttctaaaattgtcatagaagagcaggtgcccatagatggattttgaaaaactctgcttaaatatttggcacgctggtaatttttttgtttaactatatttttaccgttaattattatttgtcctgaatccgctttaatatcaccggaaataagattcagtatagttgttttcccagaaccgttagaaccgattatacatacaaattcacctctgggaacgctgaggttaaagtcattaaatattactttttcatcaattgttccccggttaaatgtttttgaaatattttttatttcaagcatcaggtctcactccaattcctttgtcacgtttaaataagatattatttataaccaaaataaatataaataggactgtaataaccaggttggtatctgttgccatcaggcctgaagcaatagcggcgtatgttaaagtcttatatattatcattcctataataacgctggtcgtgatttttaaaaatctcattttcttaaaaatagttgctcctataattactgcagctaatcccataactaccgttcctgtgccgcctccaacagaaaactgtcttgtatattggcagtttacggctcctgccagtgcaaccagaccgtttgaaatagccagtccaagaatttttatgtttcccggatttttaccgagggtaacaacaagactttcgttatcaccaacgcttcttaaaagaaatcctgattttgttttgagataccagtcaagaagaagttttgatactatagttataaaaaacataataataagcttgctgtataagttaataggggctggaagcatacttgaaaaactggaaaatatagtattgtcagtcatacttataaaaactgttgatgagccggctattctgtaattaatggaatataaggcggtcatagttaatataccgcacagcagatttttaattttaagccctacatttaaaaatcctgtaaatgctcctgctgcacagcctgataaaaatgctaatattaaacttagccacggatctattcctgcggcggaaaccgttatacataaagcggctccaagcggaaaagtaccgtcaacagaaaggtcaggaaaatctaagattttatagcttatatatactccaacagccatgatgccataaataaaaccttgctcaagtatgcttgtaactataccaaccatatatttatctcctatttacttttttcagcgttttccaaaatatcatcgggaattactatattcaaatttgctgctgtttcttcattaactgcaatttcactttgattaattacctcatatggtattgtgctgatttcttcaccttttaatattttagaggccataattccggctttttttccgagttctatataatcaacacctgctgaggcgagacatccgcctgtcacttgtctgctttcggaaccaaatatcggtatattggcggcattagccttttcaagcataacagggagattatttacaacgatgttgtctgttagattagatatgcagtcagcttgtccaagaacaatatctatcgcctgagaaatttctgatgcgttgctgatacctttttctataatctcaaaaccaaattcactggctttttctttataaatgttaagagtgctttgagagtttgactcatttgttgtatatattattcctattttttttgcgtcaggcagaatttttcttattaattcaagctgcttttctacaggcggctggtctgatactcctgtaataccatccataggttctgtttcgcttttagctaaatttgctttaacgggatcagatacagcaccgaaaaccaccggtattttattttcataacaataattatatgctgtcattgccgatggagtagctataccgaaaactaggttaacttttgagtttacaaaattttgaactatttgtgtgtttaatgaactgtcaccctgagcggatttctgaataatttctaagttgtcgccggacacaaaaccttcatttgcaagtccttctataaagccggttttgcagtcttctaatgttgtatggtcagcatattgtactatccctattttatatttatctgattgttgtttttttaaatcattgccgccgaaatttgagcatccgtttataaaaagtatagatataataagtgcagataaaataaacttttttgaattcataagctgctcctctcaaaagttaagtattaaatttttccataataaaaaacaccttatttattaagtattccaattacataaaaatacattcttaaattttatatttaaaattttatggctaaaaacttttattgtttatttgattttaaaaatatatttaattatttttttacgtataaaaatattttgttttttggagtatttataaatatttattaaatgtataattaaatcaattttaaagtgtttatgtcacattttatagataaaatatatgtgtatgtattttttatttattttctacaagaagaatatattttttttgtcaacattgcttattgataaaaataaataactgagttattataagtttgtagatttcataatatatgcagcctccccgctgcacaaagactgtgtcaaattggcgcggtctttgttttatttatattttaaatattgattgattttatataatatagatgttataatattttttaatgcattaattttttattaaaaagagaaaggagttatggcatattagtatgccatatgtttcaggaatgagattttatgaaatagttttaattgctgttggtcttgctatggttgcttttgcggtttctgtctgtaaagggcttaaaatgagtaaagttgactataaatatacttttatcatagcattattttttggagtatttcaagctgcaatgcctattataggctggtttgccggaaaacagtttgaggcttacataaccagtgtcgatcattggattgcttttatattgctggcgtttataggcggtaaaatgatatacgaagcaataaaaaatgaaggtgaagggtactgtgatttaaaatacgattttaaagaaattacattgcttgcttttgccacaagtattgacgcgctggccgtaggaatttcatttgcttttttgcaggttgaaatatggtcggcggcttcatatataggtgttattacatttattctttcaattattggagtcttagttggaaatcggtttggagttaagtttaaatcgaaagctgagtttgcaggaggaataattttagttttgataggtataaagatacttttagaaggtttaggaatattgagtttttaatttaaaatagatcggtggtaatgatgtgaaggaacaattgtatacaattccggtgaatgaagcgattgataaaaatgaagaatgtttattctgtactttaaataaaaaggtggaagaagatatattgaattatattttgggaccttcatatatggaagaagatattaggtctgaaaccgacaaaattggtttttgtaaaaagcattattcgcaaatgtataaagcgcagaatcgtttaggtgtagctttgattttaagtacgcatatgaaaaatatcagacaaaatttgaatgatatttttaaggatgaattaactgaaatcaatcacactattaaaaaaaatctgtttagaaaaaatgaggaacaaacaaaatctgttgaatacatttctgaaatagaaaattcttgttacgcttgtaaaagaatggaatctcgaatgaatagttatattgatacatttttttatctgtggaagaaggaagatgattttagggaaaaaattttaaactctaaagggttttgtcttgaacattttaatatgattattaaagagggaaaaaagaaactaagttcagataaatataaagattttttgaccgtgttggttccgcttgaacttaaaaatttggatttgcttcaagaagatatagattggtttatacaaaagtttgattatcgctttaaagatgaaccatggaaaaattcaaaagatgcacttcaaagaacaatattaaaagtttcttcggagaatgttgaggaatagtccggattaaaatcgtgaggaaatacaatggatattatagatataattataaagcagaaaaatggtattgatctttcagattcagaaattgaatacttgattaacggttatacacaagggataatacctgattatcaaatgtctgcttatttaatggccttgtgttttaccggggcaaatgaaaaagtaatatcaaagatgactatgtgtatggctaattcgggagatatacttaatctttccggtatcagcggaacagtagtggacaagcattcaaccggaggagtaggagacaaaacaaccttagtagtaggaccgtgcgtggcagcgtgcggcggcaaggtggcaaaaatgtctggacgtggtcttggatatacgggtggaacaatagataagctagaatcaatcaaaaattttaatacacaaataccagttgaacgttttatagatataattaatgaaattggtatttctatcgttggtcagttgaaaaatcttgcccctgccgataaaaaaatatattcattgcgtgatgttacaggaactgttgattgtattccgctaatagcgtctagtataatgagcaagaaaattgcatccggtgcaaatgctatagtattagatgtaaaatatggcagcggtgcgtttatgaaaacgtataaaaacgcaaaagagcttgctgaaactatgataaaaataggaaatcagaatggtaaaaaggttaaagcactgcttacagatatgaatgagcctataggaaatacagttggaaattcacttgaagtgatagaagctatacagactctaaaagggaatggaccaaaagattttttagaactttgtatagatatttcaagtgtaatgcttcagcttgaatttgttgataaatcggtagatgagtgcagaaagatggcgctggacagtattgaaaatggaacggcactgaataaattcagagagttggtatttttgcaaaacggagatgtagaatgtattgatgatacaaataaatttccaaaatcaaaatattctttagaagtaaaagctaatatgtcaggtcaaataacaaagatggattctgaaaagattggtaaaactgcatgtttgttaggagcagggagacaaagcttgaatgataaaataaatcattcagcaggaatttttataaataaaaagactgatagttatatttcaaagagtgacgtattagctgttctatacacggataaaaaagaaattttagattttacaaaagaatattatttagacagcttaacgatagaatgattatattttgtgtaaattggatcggaggtaatattggtgagagttgtaaatgcgagtcagatgaaacagatagaaaaaaacgccaacgatatgggaataacatattatcaaatgatggaaaatgcgggaatgtgcgttgctgattttgtacgtaaaaatataaaagattttgaaacgaaaataatattgattctaacaggaaccggaaataatggcggagacggctttgtcgctgcaagaataataaaaaagtttggtggaaacccactaattatgatggttgacggacctcctaaaactatagatgctatcaaaaactttaataaagctaaagattgcggaatagaaataataacttttgaaaaagataaaagtattcccataatttggggaagtgacgcaattattgatgccgtttatggaacaggatttcacggtgaattaaatgataatattaaatcattattttctgcaatttctgacagcgatgctataaaatttgcaatagatattccgagtggagtagatgattcgggtgaaatttctgacggcgctttcaaagctgattttacaatagcattagatagtttgaaaaatgctcatatgaaagaaaatacttttgaaaactgtggaagagtagtatgcgctgacattggaataccggaagaatgccataaaatataattttataaataattaattatatatttaaacgtaataaagtcagttttaattattaaaactctgttgcatataaattattttttataaataatgttaaagaaaaataagattgaattaattataaaatttggcgattattctttaataaaataattaattcgtgtgataaaaacgctgcgctttaaaaaagcgtgacgttttttctatttataaataaaaattttgttttcaatatataatcagtaacatttgtatactaaaaaatgaataaaagtataataaaaatattttttaaatgatattaaacgttgtatgaaagatcaatatattatttgaacagcatataaatattataaaatatcaattcgtttgactttaaatatatatagttttaattcttgtaattttttataagttacttttaaaatattttaaatagttttaatgtaatctataagttgttaggagtattttatagcattcttgacttttattgctttaattaatataatattataatgaaataaattaaattgaaaaggaacttaaagatgaataaaagtttttatgaaaaaaccagtcctgaaaacgcaaacattaattccaaaagaattataaattttataaataggttagaaaaagaagaagtagatatgcacagcatattgataatgaggggaaataagctgatttgtgaagcctattataatccatttaattcaaatactcttcatagaatgttttctgtcaccaaaagtgtggtatcaatggctattggtgccctagccgaagacggggttatagatttagacgcttcaataactaaatattttccggaatatgaacctgaagatggattttatccttatcttattgaaacaacaattcgcgatatgctttctatgacaacgcctcataacggaacaacatttgataaacgcagtaaaaataattggacggaatcatattttacaaagaagcctactcataggccgggaactattttttcttatgatacatccgcctcacatgtaatggcagctttggtagaaaagttaacaggtttgtctttgcttgattatctgagaacaaaaggtttgtcaaaagttggtttttctaatgaatcttattgtatttcggatgggtgtggtgtaagtcaaggaggatcaggtatgatggcgtatcctaaggatttactgcttttagctaaacttgcaattgattatggaaagattgataatattcaaattttacctgaaaaatatttaagagaagcaacaagttataaggttgcgaattttgtaaagggaagttttttagctgaaatgcaaggatacggatatcaattttggatgaccaaaaataatgggttcatgatgtatggaatggcaggacagttggcattatgttttccggataaagatttaatacttgtcacaacggctgacacaaccgatagaaaaggcggcgtacaacaaataatagacgcattttttgatgaggtgtattcatatatagacgaggaaaacgagtttgataaagattcatatttaaaactttgtgagatatctgataattgcagtctcaaacctcttaaaaataatatttcagttgagcttgataagacatatgagttttttgatgataatagtttagaaataacaaatgttagaattattaccagcgtcagcggcggaaaaattatattagataatacttatggcagtcagattataaaatttggatttaattcatttttggacgggaatttcagccattatgattgcccatatattgcttcaggatgctggacagataaaaatactcttgttgttaaggctaatcttatcggagaatgtataggaaaagttataatgcagttttcatttaaaaaggatggagctgttacaatattttccagaaaaactgaagaaatattatttggtgaatattccggttttgctcaatcaaattagattaataattcatactgtgttatttttatatttgtatattgttaattgacatgaatattaatatgtaatataattacattatgatacttttaaaaaggagctaattatgaaaaaaatattttgtaaagtatttttttgttttgttattattgttttaagttcaatatttttgatgagttgtggaaaaagtgccacaaatccggataaaataacagacaataatatttcagaaaataccggtaatattgaaaaatatgatagtgcaataaatgacgagagcaatactgttcttaaaaatgatgttgttgctttggtaaacggtgaagaacttaaagctaaagattttggatattatatttataacaatgctgttatacaaatgtataaagaggacagtaataccacggaggatgttacaacatttgattggtctaaaacaaataaagatgggaaagcattacgtgatgtagttgttgagaacgcaatagaggatgcgataaacgatgttgtgttcagacagtcggctgagaattctgggtttctcatttccggtgctgaaaaagaagccgacgagcttgtaaatggttcaattgaacgtcagggagaagaacaatttaaagtaagtgcgaatttagttggtgtgagcgatgctgaaacatataaaaaaatttatactaatatttctgtttttgaaggcgttgctgaagactttcagaataatcccgaaaaatatgttactgatatttccgtattatctaattatattggcaataaaggcgcctctgtacagcatgtgcttattttaaacgatacagatgacgcttctcaattggctgaggacgttctccaaaaagccaaaaacggtgaagactttgtggagcttatgaaacaatataatgatgataccagcgaaaaagaatccggatatacatttcctgagggagaaatggttccatcgtttgaaaccgctgctttttctttaaaaataggtgaaataagcgatatagttgaatctgattacggttttcatataataaagagaattgttggtgcatatgagcttcaaaatttttggaggtcggaagcagatgttcaaatatctccgaattctctgcaaatggttaatttttacgatgtaatggatatgattaaagaagctaaagcaaaaaatgttggttagataggttagaaaaatttatataaggatggtatattattatggaaaacaaatcaaataaagtgttggttgaaatggaaagcggagattcttttgttattgaactatatcctgagtttgcgccaaaaactgttgaaaattttaaaacacttgtatcaaaaaagttttataacggtttaacttttcatagggttatagatgggtttatggcacagggcggctgtccaatcggtaatggaacaggcggaagtgatgaaaacatagttggagaattcaagcagaatggttttgttgataacacattaagtcatacaagaggtgtagtttcaatggccaggtccatgagtcctaattcggccagcagtcaattctttatatgttataatgatgcgtcttttttagacggtcaatacgctgcatttggaaaagtagttgaaggaatggaaacagttgataagttccttgaaacagaaagagtaggtgcggagggcggaactccggttactcctatagttattaaaagtatgagttttgccgaataatattatataaggtgattttgtgaaaataaatgtacctgaagaagtaaaaactataataaaacgtttgaattctcaaggtttttcggcgtatgttgtaggcggatgtgtaagggattcaattcttaacagaaaaccacaggactgggatatttcaagctccgctaagcccgaacaagtaaaagaaattttttatgatatgggagttatagaaaccggaataaaacatggaacggtatctgtaattattaatcataatccgtatgaagttacaacatttagatgtgatggtgaatataaagataacagaagacctgatactgttacttttgtgtctgacattgatatagatttatccaggagagattttacaattaatgcgttggcttgcggctgtgaagatagcagtgaggttatagatctttttggtggaattgaagatataaaaaatggtatagttcgctgtgttggagaaccggaaaaaagattttctgaagatgctctgcgtatattgcgggctcttagatttgcttcggttttaggatttgatattgataacaaaacttcaatagctattcataagcaaagggacttgcttaaaaatatttccgttgaaagaataatgtctgaatttaaacagttagtttgtggtatcaatgcagtaagtataataagagaatttagagatgtaatcgaagtttttatacccgaaattactgctatgtttgaatttaatcagaatacgccgtatcattgctacgatgtttgggaacatactttgcactctgtcgaaatgatagaaccggaagttgatttaagatttacaatgctttttcatgatattggtaaaccaaaagtttattcagaagaaattttagaaaatggtaatactttgggtcatttttacgcacatgcaaaatattctgaggaaatagctgcaaagatattaaatcgtcttaaatcagataaccgtcttttgcatgatgtaagaaacttggtaagaatgcatggcgatcaaattccattatcaaaatcaggtataaaaagaaaacttaataaaataggcgtagagttatttagaaaattattgaaagtaaaacgcgccgatgttttggctcagtcgcctggattggctgatgaaagaataaaagctcttaaagatattgaaattttatttgatgaaataatatctgaagaagaatgttttaaaataaaagatttaaaaataaatggcaaagacctaattgaattaggtttttcaggttgtgaaatcggccaaactttaaaaattattttagatgcggtagtagatgggaaaatagataatgatagggataaaatctttgaatttataaaaatgatttaatccgttgttttataattttcatattttgacttgatttttatttatattttatatataatgtgtatcatgaaatttttataagatttatgtttagttgatagatacatttggttaggagttttatatatgaaaaaaaggtattcaattggtatagattatggttctatggcagggaagtctgtgttaattgatgttgatacaggtgacgagattgctgtgtcagtttttaactatccgcactcggttatgacggaatgtcttcctgatggcaaaacaaaactagaagatggctgggctctgcatgacccgcaggattatcttgacgtattggcctcaactataccagctttgcttaaagaaacggatattaatccggcagatgttattggaataggtgttgattttgcttcatcgaccgtcatgccggttaaagaagacggaactcccatatgttttatggaagagtataaatctgaacctcatgcttatgttaaactttggaagcatcatgcggctcaaaaatatgctgatagtttaaataaatacgctgaaaaaacaaatgaggactttttattaaaatacggcggaaaattttcttcagaatggttagttccaaaaatttggcaaatagcagaagaagcaccgcgcgtttatgatgaaatggacaagtttataggggctgctgattggatagtttggcagctaacagggattgaaccgataaatactcaaggaatagaaaacacgctgccgtcaaaagagtttttaaaatcacttaacccaaaacttgaggactttgttgatataaaatttaaacgcaaagtttcttcaattggtaaaaaggctggtgaactaaaccaatttgcagctggacttacaggtttgaagcaaggaacagcggttgcagtcggaaacattaatactcaggtatcacttccggccgtagggatagctgatccgtgcaaacttcttatgataatcggaaagtctgcttgtgatattgttttgggggaagaagaaaaaaatatttccggtatttactgcgccgataaaaatagtattattgacggatattatggctatgaggcaatacaatccggcgttggcgaacattttgattggtttgtaaaatccagtgtccccgaaagttattatagggaagcgaatgctcttgatatgaatattcatcaactgctgtgcactaaagcaagcaaacaaagacccggcgaaagcggattgcttgctttggattggtggaatggcagccgaagcgtattgatggataaagatttgtccggtgtaatgctcggattaaacttacaaaccagacccgaagaaatttatagagcattgcttgaagctactgcttatggtgctagaatgattttagatactattagagatgctggaatacctgttacagagctttatgctgccggtggagttgctcagaaagacgcgtttataatgcagatatatgctgatgtaatgaatatggacataaagattgccggttctgttcatacacctgctttgggttcagcaatgtcaggtgctgtcgctgccggaaaagaaaatggcggatatgacactattgaggaatgtgcgaaaatattaggaaaaacaaaagctcattattatcgtccaatacctgaaaatgttgagacttataatgagttatataaagaatataagaaacttcataattattacggtaaaggcggaaatgatgttatgaagcgtttaaaagatataaaaatggcattaaaaaattaaatgatttttaaaaagaggtaaatcaaaatgttagaagaactaaaacagaaagtctatgacgctaatatgatgcttccgaaatatggtttggttacattcacttggggtaatgtttctggaatagacagagagaaaagtttagtagttatcaaaccgtcaggtgttgattatgataagttaaagcctgagcatatggttgtggtagacttaaataccggcaggattattgacggaaatttaaaaccatcttctgatacagcaacccatcttgaattatataaagcttttaaaggaattggtggtgttgttcatactcattcgtcatatgctacttcgtgggcacaggcaggcagagcaatcagagcttacggtactacgcatgcagattatttttatggagatattccttgtactagagctctgactaagatggaaatagagaacgactatgaattaaataccggaaaagttattattgaaacatttgagaataaggatccggaagctattccgggggttttagtatttaatcatgctccattttcgtgggggttagatccagctgaagcggttcataatgctgtagtgttggaggaagtcgccaaaatggcttttcgctgcgagataataaaccatgatattactagaatgggtaaatatattttagacaagcattatcataggaaacatggcaaaagtgcctattacggacaaaataattaaactttacggagaattttatgggtaaatttattgtgtttgaaggtcttgacggctgcggcaagacttcacagattgatatactggcaagacggctaaaagaaaaaggtgaaaaagtctatgttacggctgagcctacaaattatgaaaccggattgtatttaagacgaattttgtcagaaagtttggaaaaagatatatatttgttggctgctttattcttagcggataggattgaacatataacgcatcccgaaaaaggtataaaaaagtatttagatgatggttacacagttatatgtgacagatattattattcatctctcgcttatcaggggaaaaatccaaattgtaattttgaatggatacttaatttgaaccttaactgtgaaagattgttaacccctgacatttgtttgtttcttgacgttaacccatcaacatgcaaagatagaattgatgtatccagggataatatagaactttatgagaaaagcgtggaagaaatgagtaacataagacgcggttttttggacgtgttttctacgctgaaaaaagattatagtcaaaatattatgattattgatgctaatggaagcattgatgatgttgcaaaggagatattaaaatatgtatagaagattattcacttctgagtctgtaacagagggacaccctgataaaatatctgatttaatttcagacgcgattttagatgcaatccttttaaaagatcctaatgcccgtgtggcagttgaagttactgtaacaaccggactggtgcttgttgttggagagattacgactaaaacttatgttgatataaagagtattgttcgtgaaacaattcgcgaggttggatatgaccgagctaagtatgggtttgattgtgatacctgcgctgtgcttgtggctattgacgagcagtccggtgatattgcacggggagttgatgacgacggagacggaattggcgctggggatcagggaatgatgtttggttttgcatgcgatgaaaccgatgaatatatgccaatgcctatatacttatcacataaattgacaagacaacttacaatggtaagaaaaaagaatgttttagattacttgagaccggacggaaaagcgcaggttactgtggaatataatgaggatggctctgtaaaaagagttgacactattgttgtttccacccagcacaatgaaactgttacacaaaagcagcttcaggatgatatcaaggaatttgtaatagaccctataatcggtgatgatctcaaggacgaagatactattatatatataaatcctaccggaagatttgttattggaggcccacagggcgacagcggacataccggaagaaaaataatagttgatacttatggaggatatgccagccacggaggaggagccttttcaggaaaagacccaacaaaagttgatagaagcgccgcatatgcagctagatatgtagctaaaaatgtggttgcagcaggtcttgcaaaagcatgtgaggtacaattagcatatgcgattggcgttagcaagcctgtgtctattagagttgacagccgaggtaccggtgttatcagtgaccaagaaatagaagaaaagattttaaaagtttttgatttaactccgggcggtattataagagatttgaacttaaagcgtccgatttacaagcagactgctgcttatggacatttcggacggaatgatttggacttgccgtgggagaagattgacaaagctgaagctttaaagaatgcataataatattacaaaggaagcgcattcatgttgcttccttattgtttatatattgataggagagtattatgtcttatgatgggtttgttacacatagtgttgttcatgaattaaacggtaaaattttaggcggtaaaattgataaaatataccagcctgaaagcgatgaaataataatttcggtcagaacatttgatgggaattaccgtttattattatcagccagcgcatcaaatgccagagtgcatttaacgacatcaaaacgcgaaaatccaatgaccccgcctatgctatgtatgctaatgagaaagcacttattaggcggcaaaattatcgggatagaacaggtagattttgatagaattattaaaattgatatagaatgttataatgaacttggcgatttaggagttaaatcaattatttctgaaataatgggcagacacagcaatataatttttattgatgaaaataataaaattttggatagtgcaaaacatgtggattttacagtgagtgcagttcgccaaatactgccgggatttgtttatcagcttcctccaaagcaggaaaagatgtcgcctaaggagttttctctgcttgattttactaatgattttactaaagaagataaggatattttactggataagtttctgttaggtaaaattatgggtttgagtccgcttattgcaagggaaatagtatatagattttcaaatcacacaaaaatcgcaaaaagagaaattgatgattataaatttgctgccacagtggatttatttcttaaagatattgtttcagataagtattcaccgtgtcttgttttagaaaaagatacaggaaagccgatgtatttttcatgtgtagaattaactcagtataaaaatgttgctgaaattaatatattagattcaatatctgagataattgataaatattatttaacaagggcttctcaggagagaatgaagcaaaaaagtgcaaatattttgaaattagtccacaacaatattgatagatgcactaaaaagcttgttatgcatcgtgaaaatttagaaaaagcgaaaaatagagataagtataaaatttgcggagatttattgacggcaaatatgtatagggtaaaatttggtatggatgaagtctgtgtggaaaattactatgataataactctgaattaaaaataaaacttgatccaaatatatctccttctcaaaatgctcagaaatactataaaaaatataataaagcgaaagtaacagaaaaatatgccgaagaacaaattgtaggtgctgaagaagaacttgagtatttagaaactgttcaggaaagtatattaaaggcagaaagccctagagacttatctgaaataaaagaagagttggcagaacaaggatatatctctaatactgcttcaaagaaaaagaagaaaactcaaaaatctatgcccatgaagtttatatcaagcgatggctatgagattttagtaggacggaataataagcaaaatgatgaagtcacaattcgtatgtcatattctactgatatttggcttcatacaaaaaatattccgggttcgcatactttaattagaacaaatggttcaggcgaagcaccggatagtacaatacttgaagctgctcagctagcggcatattatagtaaagctaaaaattcggctcaggttcctgtagattatacacaaataaagaatgtaaaaaaaccaaacggtgctaaaccgggctttgtaatttatgaaaaaaataatactgtttatgtaactccaaaattatttgaaaaagttacagaataaatgtttaagtaaaatattgtttttttagataaaatataagtttttatgatagttaataagtaaacttgttattttagtaattatgaacgtatttttttagattgaaaaatgtctttatttagtatagtttaaaaatgtcttttaactatatatttttatttggattaatgatctaattcagcttcccaaatgggaagctgataatgtatttgccgaaatttttaataattaactatttttttcttcatagtatttctttatttcaccagctaaaaataatgaacctataacacataataactcatctttatgaagtgttttcacaacttcattaaatgcagaaattggatttgaattaatatctgagacgatgttatttttcataaaaatattctttatagtacctgaatccaaacatcgcggcatatttatttctgttgcagttatttttgatttttctgagatagcataatcagaaatcaaattaataattgattcataatctttatcagacataaaagcaactaaaaaatgaatttttttattcagactttttaaagattttaagaaagaatttattgcctgcggattatgtgcgccgtcgacgataatattcggtgcaataaactcaaatcttccttctatgtttgcatgttttaagccatttgttatacaatcagaagaaatagcatatccttgatttaataaactattgataatttcaatagctgtaactgcattataagtttgaaatctgccatttaatgttaaatcatagcgcgttcctttatattcaaaagaatttttataaggttccggaagcgttggtaattccggaatgattaaattagagtttttttcttgacatattaatctaatattatcaaatacttttgattcttgaataggatataaaaccacatctgaatttttcttaattatcccggctttttcttttgaaatttcatctatggtattgccgagatattgacaatggtctaatccaattgcagtaaaccctactaccaaaggatttttaataatatttgtagcgtctaatttacctccaaggccaacttcaagaataacaaaatcacagttttgtctattaaaatattcaaacgcaacagcagtgtcaaaagcgaactctgatacaaatgcgtcatatttttctgttattttttttacatatgacgcgatatcagctaaatcagaattgcttataggtacaccattaattttaattcgctcattaaagaattttaaaaatggcgatgtaaataatcccgttttataacctgcttcagtcagtatttgtgaaaccattgtacaggttgagcctttgccgtttgttcctccaatatgtataaattttaaattatcctgagggtttcccattttgtttaaaagtttttctagcagagcattacccaaaacacggttaaatttaggaatactatgtatatattctaatatttctttatagttcatattattctgtcctcctgacagaaacaccctcgttttcaagataattttttaaatcacaaatttctatttctctaaaatggaaaagtgaagcggcaagtgcagcgtcagctttgccgtcagttaatgcatctttgaaatgtgacatgtttccggcgccgccggaggctattacaggaattgaaacattttcagatatagtttttgttaattctatatcataaccatttttggttccatcacaatccatagaagttaatagaatttctccggcacctaaactctcagccttttttgcccactctaaagcgtcaagcccggtgtctatacgaccgccgtttatataaacattccagcttccgtattcatttctttttgcatcaattgcaactacaacgcattgacttccaaatttttgggctgcctctgatatgagttgaggatttcgtatagcagatgaatttattgaaattttatccgcaccttgcagcagaagttccctgaaatcatcaacagatttaattccccctcctacggtaaatggtatgaaaacagtctcggcaacttttttcgccatttctataactgttcctctggcttcatgcgtagcggttatatcaagaaaaacaagttcatctgcgccggcttcgttatatatctttgccacttcaacaggatcgccggcatcaattaaattaacaaagttaactccttttacaactctgccgttttttacgtcaagacatggtatgattcgctttgcaaacattttatttctcctttttataaattgccaaagttctttaaaactttcaatccttcatttccgcttttttcaggatgaaactgtgttgcaaaaatattgtttttatgcacagcaatcggaagttcagttccatattcagttacggcggatataatttccttatcctttggattaatataatatgaatgaacaaaatacatatatggttcttcacttaatccttgaaaaataggacagtttttgtcgtactttattgaattccagcctatatgaggaattttaaggctgccctgttttggaatcttgatacaatttccatcaaatattttgagaccgggttcattaggtgattcctcacttgtttcaaataaaagctggagcccaaggcatattcccaaaaaaggtacgttattttctataacttgatgtatacactgagttagataagctttattaatagaattcatacagtcgccgaaagcaccgacgccgggaagaattaccttatctgcagaaattatttcatccggttttgaggttattttagctttaaatcccaaaaattccaaagctttttctacagaccgaagattgccggctccataatcaataatcgctatcatcgtgatctccttaaagttttgtcaatataatatgaattcaattatactattttataataattatttcaagagtaattgagaaaaatattgctgtaattttacataattcgttgacttaaacagtaaaatattacttgccatatcatttggtttgtagtataatgacaaaaggtataatttactataatgacgtttattactgaaatcaggtgacagaaaatgaaagtattatttatgggaacgccggattttgcggtgccttgtcttgaatcaatcattaaaagtgaaaataataatgttattggagttgtaacacagcctgataaaccaaaaggaagaggtcataagcttcagcctacacctgttaaagcaaaagcagttgaatataatatacctgtgtttcagccggaaactttaaaaaatagaagttttgaagatgaattaaaacagctgaatcctgatattattgttgtagtagcatatggtcagatattacctgaatatattttaaattttcctaagttcggctgtataaatgttcatgcgtcattgcttcctaaataccgcggtgcagctccgatacaatggagcgtaataaatggagacacaacaaccggagttactacaatgtatatggctaaatcccttgatacaggggatatgatacaaaaagctgaaattcaaataggcgatgaagaaactgccggagaacttcacgatagattatctcttataggagcagatttgattgttgaaacaataaaaaaactttctgaaggcaaggcgatcagagtacctcaaaatgattcactatcgtcttacgctcctatgcttaataaagaaaccggtcatattgattggaataaaaattcttctgatataatcaatttaatccgcggaacaaacccatggccaggagcttttacaagttataaatctgaaataatgaaaatatataaagcatataaaggcaatactaatacagttggtaaacccggagaaataataggaataaaaaataaaaaaatagaggtttgctgcggtaactcaagttcaatattaattgatgaaatacagtttaagggcggaaaacgtatgaatgtttcaagttacttaaacggtcatagtatagatatcggtgaaattttaaattaggaggtaattaaatgtattttggtttatttgaccctacaatgtatttgctgattcctgcaattatattagctttatgggctcaaacaaaggtttcaagtacctttaacaaatattcaaagatagcaaatgcacgcggtttgacaggttcagacgcggcgagaatgatattagacaaaaatggtttgtattcggttaaaattcagcatataagcggaagtttaactgataattttgacccaagaaccaatgttgtaaatttatctgacgcaacttatatgagtaacagtataggtgcaataggtgttgcggcacatgaatgcggtcacgctgttcaatatgcaaccggatataccccgataagaattagaaatggaatttttccagttgtaagcatatgcagtaagctttctatgccaattattctattaggatttatacttacagctttcggcggtatggctcctttaattgtggatattggtataatattgtattcagctaccgttgtttttcagcttattactcttccggttgagtttaatgccagcagccgtgctttaaaaactttggaatcatatcaaatgttgggttctgaagagataaaaggtgctaaaaaagttttatcggctgccgctatgacttatgttgccgcagctttttctgcgcttatgacattgctgaggcttgttttgttatcatctaacaacaatagaagagattaggagtattcatgaattcaagagatatttcattgtcgatattaaataaatatgattatgacaaggcttatgttaataaattattagcagatacttttaaaaataaaaatatagacaataaagataaaggtttaattaatgagctggtattgggaagtatagaaaatcggtatttgcttgattttataatttcccaattttctaaaattaaaattaaaaaaatgtctgtatcagtaagaaatattcttgaaatgggaacttatcaattattatttcttgataaaattcctgattcagctgtgtgtaatgaaagtgttaagcttgcaaaaaaatatgcaaatcgttcgtccggttttataaatgcagtgttgagaaatataagccgcaataaatataatataaaatatcctgataagacagaagataaaatagggtatctttctatatactactcatttccaaaatggatagttgaaaaattagttgaccaatttggatttgaattttgcgaagatattttaaaatcttcgtttaaaacatattctccggctatacgtgcaaatatattgaaagtgcctaatgatggaaatggtaaagttaaaactgacgagtttatcgatactttaaaatctgagaatattaatataattcctaatgaagatatacaaaattgtttttgggtagatggaaaacttgatataaataattctgaaagctataaaaatggtttatatacaattcagaatcctagttcacaattaacggctataacgttagacccaaaaccgaatgagataattatagacgtatgtgcggcacccggtggaaagaccacccacatagccgagcttatgaaaaataaggggcgcgttttggcttttgatatttatcagcataaaattgatttaataaataagtcggcaaatcgtcttggaatagatataatagaagcagttaaacatgattcttctatatttaagcccgaacttgttgaatatgctgatagagttttagttgacgctccttgttctgggtttggcgtgatacatactaaaccggatattaagtggcatagaaatgagaatgatattaaagaattaataaaaatacaggaaaaaattctttccgtttcgtcaaaatatgttaaaaaaggcggtacattgatatacagtacttgtacaattttgaaagatgaaaatgaaattcagatttcaaagtttctttcagaaaatagagactataaattgatttcagagaaaagattgtttactcatattgacggaggaagcggtttttatattgctaaattaaagaggatttagaggcttaatattcatggataaaataaatttaaaggatttgacattagaagaacttcaagattatataattaatcttggagaaccgaaattcagagcactgcaaatatataaatggatatacagcggtgtgcggagttttgaagaaatgactaatatttctaaaacgttaagagataagctgaaatctaatactactatcggaaatcttgcaattaataaaaagttcgtatcgactcttgacggaaccaggagatatttgatacaattatcggataataattatattgaatctgtacttatgaaatataaacatggttattcaatttgtatctcatctcaggttggatgtgcaatgggatgtaagttttgtgcttcaactaaaaatggtaaaatacgcaatctctcagccggtgagataattgatcagattatcactgttgaaagggatgttgatgaacgcatttcaaacgttgtcatgatgggtgttggcgaaccgttggacaactttgataatatagtaaaatttataaaaaatgtaaataatccaaacggtttgaatattgggcaaagacatataaccatatctacttgcggtattgttgaaagaatttatgaattggcagatttgaattttcaaattactttagctatttcactgcatgcaacaaatgatgaaaccaggaatgatattatgcctgtaaataaaaaatataatatttcaaaattgcttgaagcatgtaaatattacgtgaataaaacaggcaggagaatcacatttgagtatactcttattaataaaaagaatgattatactcagaatgcagaagaactctcaaatttattaaaaggtattttatgccatgttaatttaattccggttaattcagtagatgggactggatttgtaccaggcagtgaaaaaaatataagagaattccaaaatattctcgaaaagaatggtataccggcaacagttcggcgtgaaatgggaagtgacatctcagctgcgtgcggtcagttgcgttcacagatataaacaataaggaaggagcgttgacaatgaaatttgatgtttatggcgttactgacactggatgtgttcgtcagctcaatgaagataatttttgtatttgtggatttgagaacaataatgaacctggatattgtgtcgttgctgatggaatgggcggtcataatgccggagaggtagcaagccagctggctattgactttattactgaatccctcaatgatatacttcaaaacagtgaaaatcctgatgtgccaagaagaattaatgatgccttaaattctgcaaacgagagtatttataaaatggcaagagaagacaaaaatcggaacggtatgggaacaaccacggttatatgtacatttgccaatggtgagggatatatagccaatgtaggtgacagccgtgcttatgcttgcagaaatgatgaaatttatcaaatcactattgatcattctattgttgaagagatggttgctaatggttcaattacccgtgaggaagctagagttcatccacagaaaaacattataacgcgggctataggaagtgagaaaaccacaaaagctgatatatttgaatatgaatataaacctggggatagtattattatatgcagtgatggactctcaggaatggttgaggacgctactattttgaagacggttcaggatggtaaaagttcaaaagagattgccgataatttgtgtgagttggcaaagaaaaatggcggggttgataatataactgttatagccattagaattatggaggaggagagttccatatgaatatgattggtaaagaaatagatggaagatatgaaattcttgaggaaatcggcaagggtggaatggcacatgtttataaatcacgggataagtcactaaatagacttgttgcagtaaaggttcttaaagaggattataaagatgataaggaatttgtacgtcggtttaatgtagaggctcaagcggcggccagtctgtcaaatccacatattgtttctatatacgatgttggatgcgaaaatggaatgcattatattgttatggaatatattgaaggagaaactttaaaagagtatatagaccgagttggagttcttccctggcgtgaagctgcaaattattccattcagatttgtgaaggtatagaggaagctcataataactcagttatacacagagatataaagccgcaaaatataataatggcttctgatggtgtgctaaaagtaacagacttcggtattgcaagagcatctactcaggcgacaatgaccatggcgaacaataatacaattggaaccgcacattatttgtctccggagcaagctagaggcggatatacagatgagcggacggacatttattctatgggtgttgttatgtatgaaatgcttacaggacaacttccgtttgatgataacagtcctgtggctattgctataaagcaccttcaggaaacggctacacctataacagatataaatcctgacgttcctaatgcattggaacaaattgttatgaaagccatgtcaaaagaacaagacagcaggtattcttctataacagatatgatttcagatattaaaaaagttttggctaatccaaatgtaaatctttttgcggcaggcagacgaagtttacctgttgataatcaggtaaacgatgcagcttcaaatacaataaaaatgcctagaacatttgtggattctaatcttgatgaacaaatgatacctggatatgatttagatgattatgatgagcaggatgaagaatacgaagctatggaacgtttaaatgaaaaaagagccaaaagattgaaaaaaaagaaagaacgtaaaattgcttttattgcctttttgtctgcacttgccgttttagcagttggatttgcggctgcttttgcatttaccggtggttttggtatttttggcgtagagaaagattctattcaaatacctaatgtagttggtatgactattaaagacgctcaatctcagtatggcaaaagctttagtatcattgaacaaaacagaactgaaagtacaaaaccggcaggaacaatattagaacaaactccggctggaggagatacagtttccaaaagagacaacatcattatcagagtagtagttagcctaggaagcagttctgttactcttgatgattatactggaatcaaatatgataaggcaaaagaagaattagaaaagttaggtttaaagtgcagtaaaatagaaaaagttgaccctgaaatagaggcaggactaattattagtcaggaacctaagtccggcagttcggttgcagcaggagatatgattacatttactgttagcaagggaccggaaagtacaccggaaccttctcttgtgccaaataaaaattctaataatgactcgaataatcactcaaataatgagaacagttcgtcatcaaataataaaccgaattcgaatgattcgtcaagtaactcgtcaaataatgacaaaaatgatgagaattcttctaataatagtggaagcaattcaagttcaggcggttcaggtaacactacaaatgagggctctagctcaggcagcagtaccggttcgggaaccagcacaggctcaggcagcggaagcggaacaggttcagaaaccggatcaggaagcgagtcgggttctgagggcggcacaggttcaggcggaggaagcggatccggatctgaaagtggttcaggaagcggttcagagactggctctggtggttccggcagtgaaagcggaatgggtagcggaacaggttctgaaggcggaagcggcaatggtttagaggattaatatatgccggaaaaaaatcaatttgaaatacagggtaaaatttttaaaggtatcggtggtttttattacgttaaagccggtaattttatttatgaatgcagagctagagggcgttttagaaaagatggaataactccattggttggtgatgaagttaattgtttgattgataaaacttcaaatacaggtatgattagtaatataatgtctagaactaattctttaatacgccctcctgttgccaatgtaacacaaatagctatagtcgtttcagtcactaatccgaaacctaatttaaaaactgttgataaacttatatcatcagctatatatgctaatataaagccattaatatgtattaataaaaccgatttacaaaatggcgaaaacctttttgaaatatattcgaaaataggatttaaaactctttatataagcgctgaaagtaaagaaaatatagatatgcttattgaaaagctctcaggagaagtcacggtatttgccggaaattcgggtgttggaaaatcaagtttactcaactgcatattaaaagacgctaatcttgagaccggaacggtgagcagcaaaatagaacgcggacgtcatactaccagacacagtgaattaataccgcttgataacaacggaggatatattatagacacacccgggtttagttcattctctgtaagcggttttgatgaacatgagctttataagctttttcctgaatttatagagtattccgataattgcagatttgccgactgcagtcataccgttgaacagggctgctctgtacttgaagcggtagaaaccggtgaaatcagtaaatccagacatgaaagttatgtcgaacaatataaggaaattctagatagtaaaactttttgataacgggggataaataaaatgtccaaaataattatttcaccttcaatattatctgctgaccctgccaatttagaacgtgatgttaggctggtagaagaggctggagctgagtatctccatattgatattatggacggacattttgttccaaatttaagttattcggcaaatgtaataagagctttaagaaagaaatcaaacttaatatttgacgttcatttaatgcttcaagatgctgacaaattcattgatgaatttgcagaagccggttctgatataattacagttcatcaggaggcagttccaaacttaaaagaaacacttaaaaatattcactcatttggaaaaaaggcaggagtaagtttaaaacccggaactcctgtagatatgattttaaatgttttggatttgactgatgtggttctgcttatgactgttgagcccggatttggagggcaaagttatcttcatcaagtagataaaaaaatctctgaattatataagattatcaataatcaaaatctaaatatcgggatagaggttgatggagggataactgaggaaaatgtgaacagacctgtaagagcaggtgcaaacattattgtttcaggctcagcaatttttaattctaacaacataaaagatacgataaataaaatgcgtaagaaagcggaacaaggagtacaagaacgtgaaatcaataatttttagcggcgcttatatagaaaactatgattatttgtctgaaattaattttgatgaatatctaataatatgtgcggattccggatataaacacgcagagaatttaaaaatagtaccggatgttattttgggcgacaatgattcatatttaaaaaagtatcctgataatattaaaaatcttgtttttccaccagaaaaagattttacagacacccacgcagcgatagattatgctattaataataatgcagaagaaattttaattattggcggtcttggcggcaggatagaccatgaattttctcatttttgtcttatgaattatgctttggataaaggagtaaaactaaagttgattaatgacacaaatgaaatatggatggaaaataaaccttttaaacttaaaaaatctaaaagaaaatatgtttcattctttccttatgcaggagctgtattgaatttttcaataaaaggtttaaaatatgagacaacaaatatgcgtttggttccaaaccgagttcaagcgtcgagcaatgagttttgtgattctgatactgcaattgtaacctttgacagcggacttgttattgttatgttatgtgacgacagatattaattttaagtggagattttgcaatgaaatatatattaaagaccttgtcgtattttgtattaattaccattgtagctgtatacagttcatcatgctctttaagtgataaatctgagagtataagtccttctccagccccaagtattggagtgagtaataatacggctttcagcgatatattttctgagtttaacgaattaaaaaatgtatcagcagccctgttaaatagtaaaactgatttagtttggtggcagaaatttgattcaatatataataatgtgaatgcagtatatgaagaaaataatgctattaatatgagcggtaaactcggcggtatggataagtctttatcacaagcgttggtaagtgtttcgtcatcatataaagacgcatttgatattatgaacgcagcaaaagacaatgatgattcggaaatacagcaatatgcttataatgatttttcaaataaaatatcttctgcaaataatcaatgggaatatgttttagaaacattgattgaaacatctccgcctgatagtagtcaataaaacaattatttatatattgttaatttaaaataaaattatattttagctatttgtcgttaaaccatctatatagtttgtcgtatatagagtatatattataaaataagttataatattaatataagaccccagcgtgtaagaaactacgcatggggtcttatattaatgagattatattcaactatgcctttactatctttaaaaatttctttttacctttttttactatcatttcgttttcattttcgaaataagtattatcaataattgtcgaaacgtcagaaattttctcgttattcactgtcagtccattttgctgtataagtcttctgccttcagcttttgatggtatgagtccaacctgaaccaataaatcaagtacatttattcctgcattgataattgaagcatcaacagtttccgatggcatatcagctgcattaccacctgaaaatatagccatagccgcatcatttgctttttttgcttcttcttcaccatgcaccatttttgtaacttcatatgctaataagcatttcgctttgtttagttcagcaccttcacatttttcatattcagcaatttcttcaagcggtagaaatgtaaccaattttagaagtcttattacatcggcatcatcaacatttctccaatattggtaaaactcataaggtgaaactttctcagggtcaagccaaagagctcctttttctgttttacccatctttttgccctcgcttgttgtaagcagagtaaatgtcataccataagcctgtttgccgtctttacgcctgattaactcaatacctccgagaatattagaccattggtcgtctcccccaaactccataataacgccgtaatctttatgaagcttataaaaatcatagctttgcatcagcatatagttgaattctaagaatgaaagccctttttctaatcttgttttaaaacattcaaatgtcagcattctgttaacggaaaagtgaacgcctacgtcgcgtagaaagtcaatataattcagtttcagcagccaatcagcattgttgaccattatagcgttctcaccgtcaaaattaatgaatttagacatctgttttttaaagttgtctgcattatgctgaataacttcctgagttatcatagggcgcatatcagcttttcctgttggatcgccgaccatggtagtacctccgcccaataaaacaataggtctgtgtcctgcgttctgcatatgtttcattactataagctgcataaaatgacctatatgaagactgtcagcagttggatcaaagccaatataaaatgttattttctcttttccgagaagctctctgatttcatcttcatgagtagtttgggcaattaagcctctttctttcagggtgtcaaaaacatttttattattcattgtccgaattctccttttctccatcatctactggtacagttatttcaatacccagttcttccaattgttttttatcaacataactaggcgatttcagcattaattctgatgcggtttgaacttttgggaaagcaattacgtcacgtattgaatcgcagcctgccataatcataacaagtctgtcaagaccataagctagtccgccatgcggtggagttccaaatttaaatgcctccattaaatgaccaaaacgctcccaagcttcatcatgcgtgaaaccaagtgctttgaacattctttcctgtaaatcagaattaaatattcttaagcttccgccgccgatttcgcttccgtttaaaataatatcatatgcttttgctctaacgttttgaggttcagtttctagtttttcgatatcctcatctaccggatgtgtaaatgggtggtgtttagcaacgtatctgtcttcctcctcagaatactcaaagagagggaagtcagtaacccaaagaaaattaaatttagaattatcaataaggtcaaattgacgtgccacttcaagacgcagattaccaagagcatcatagaccacatcgtttttatcagcaattataagtattgcgtcgccaggtacagcgtcagttttagaaagtattgaattaatctcatcatctgataaaaacttggttatttgtgaacgcaaagaatcatcttcaacaacaatccaagacatccctttagccttatatgtcttaacatattcagagagtgcatcaagcttcttcctggataacttgttcccaagaccttttgcatttatacagcgaacgcttccgccattttcaacggcgccggagaacactttaaaaccgcagttttttacttcatcagaaatatctataagctccaaaccaaatcttgtatctggtttatctgaaccaaatctattcattgcctcattatatggcattcttataaaaggagtttctatgtcaattcccatagcttctttaaaaactttttttaaaaagccttcatttatgtttattatcgtgtcaatatctacaaatgatagttccatgtcaagctgtgtaaattcgggttgacggtctgctcttaaatcctcatctctaaaacatctgacaacttgaaaatacctgtcatatccggcaagcataagcatttgtttatattgctgcggagactgcggcaaagcgtaaaattttccttgctgaaccctgctggggaccaaataatctcgagcgccttcaggagtgcttttggtgagcataggagtttcaatctctaaaaatccatttgcatcaaaataatcacgagcaattttagtaactttgtgacgcagcatcatatttttttgcatatcaggacgccttaaatcaaggtatctatattttaatcttagtgcgtcattagtgtcaatgttttcctcgatatagaaaggaggtgtttcggatgagttaagaacccttagctcagtaacaaaaacttcaatttcaccggtaggcatatttttattgacattttcaggcgttctcttgagaaccttacctttaacagcaataacatattctccttttaaatgctcggatttttcaaatacatctttgtcagttgaatcgttaaaagctaattgtactatgccggttctgtcacgcagcgtaacaaaatttactcctccaagttttctgttttttgctacccaccccataagaacgacttctttgttttcatctgaggcattaagctcaccgcacatatttgtacgtttcatatcagacaatgtttcaaattccatttatctttctccttaaaataaattataaacaagataatattattattttattatattataaatcgaatcacaggataattctacaatagtttcttcaccggtatccatgtttttcagtgaagccttattatttaaaacttcatcatctccgataacaatactataacatgctccaagtttatttgcatatttcatttgtgctttaacgctcctgtcacataaatcgcgttcagcccaaagacctttatttcttaaatcatatactaacttttgtgcggttaagctggcattatcgccaattgaagctacaaatatattcggacccaaactttctccaagttcgattccttggctttttaaaattaaaatcagtcgctcaatacccatagcaaatcctataccaggagttggcttacctcctaattcttcaacaagtccattatatctgccgccgccgcatactgtagactgagctccgagagcgtcagatgttatttcaaacactgttcttgtgtaataatcaagccctctgacaatatttggatcaatagtatattttatattaagtttatctaaatatgatgtcagctgtttaaaatgagaatcacaatcctcacataaataatcaatcatacgcggagcattagcgcaaacttcctggcataccggtgatttgcagtcgataatccgcattggatttttctcaagtctatctttacaagtatcacataatttatcaatatggctgctgaaatatttttttagttcttcattatactttggcttgcatttttcacacccaatactgtttaaattaagtgataagtcttttacaccaagagttttaaaaaagtcaaaagcaagagttattatttcagcgtctgtggcgcttgaatcgcttccaaaacattcaagaccgaactggtgaaactcccggagtctgccggattgaggcttctcatatctatagcaagaaattaaataatataactttgtgggttgaggattcgcataaagcgaattttcaatgtaacttctaaccaatgaagcggttccctctggacgcaaagtaatgctacgcccgcccttatcgttgaatgtatacatttctttttgaaccacgtctgtcgtgtccccaactcctcggctaaaaagagaagtatcctcgaaaacaggagtacgaatttctttatagccgtatttagcacaaatttcatgagccgtattttcaatcagtctccaaatttttgaatcgtttggcagtatatcttcggtgcctcttggcttttttatcatttttgcctctcctttacaaaatttgttaatgtcccaataccatcaatttcaacctccactgtatctcctatattcatagaaccaataccggagggagtacccgttgtaatgatgtctccgggataaagagtcatgatttgcgatattgcagaaactaaataatcagttttaaatataaaatttgatgtattggattcctgcattacttttccgttaaggcgcaaacgaatatcagcgttatcaggatctaattctgtctctataaatggtcctattggagcaaatgtgtcaaatcctttagctcttgtccactgtgaatcaagcctttgcaaatcacgagcggtaatatcatttaaacaagtatagccgagaatatattttttagcttcagattcgcttacgtatgatgcggtttctccaataactattgctaactcagcctcataatcaacttgttctgacatatcaggatatataatattatccatattaccaataacagaagaggatggctttaaaaacagagcaggaaatttaggaatattcagccccatttcatttgcatgattcgcataatttaatcctactgcaactatttttgagggttcgcacgtcggaagaattttaacttcatttctattaacatttgtacttgtatatgaaaagaaatcaaaaatatctccttcaattaattcaaacatatttgaagaactatcatactttgcgtaataaatctcatcattatataatattctggcaaatttcattatttcatctccgtttatttttctgatatagaataatttgaaaggatttcatcaaataaagctatcaaatcatttcgtccggtacgcttttcggcagaaaatggaattaatattgaattattatccatttgtaaatcattataaatctcggttaaatttttgtcaatttgtgatttctttaatttatcaatttttgttgcaacaacaattgtattaaaattataatgtcttatccaatccgccattgtaatatcatcttttgacggtgcatgtctagcatcgactaactgaataacttgaactaaattatatctttttgatagataagtatcaatcatggctgaccatttttcttgctcagcttttgaaactttagcatatccatagccgggtaaatccacaatcctgtatctgtctttttgaatttgatagaaatttattgtggcggtttttcctggagtactgcttgttcttgcaagtttatttctatttgtcaggcaatttattaaagaggattttccaacattcgaacggccaacaagagctatttcaggaactaatgtatcaggatattgttcaaatgaaactgcggttttaagtaaatctacttcaacaaaatccattcgtatcacctcatcaaatttatatattacagttttgcaatcgttacattgcttatatcattttttatatatagttcattgtcaaggggcaataagttattcccacttttttttacaggcaatgacggtttgaatggtttagttaatgcattttccaaaacatcaaccatatttttagcaaagataaactcaatattatttttaactatatcaggaagctcttcataatctgctttattttcaaacggtataataactttttttatacctattcttaaagctgccaatgttttttcttttaagcctccgattggaagaacttttcctcttagtgttatctctcctgtcattgcaacgtcatgttttacaggtttgccggttaaagcagaaatcatagctgttgccatggtaattccggcagatggtccatcctttggtattgctccttcaggaatatgaatgtgcaaatcataatttttataaaaatcagacttaattccaaatttataactgtttgaacgtataaagctatatccggcctttgcagattctttcattacatcgccaagattaccggtaagctcaagttttcctgtaccgtccataatattaacctcgacggataatgtttctcctccaacttctgtccatgctaacccattaactattcctacagaatctttcttttcgattgagctgtcgttatagatttttttgcctaaaaattcatttaagtttttccttgtaacgcttatataaaaatcattatcttccgcaactttaacagcaacttttctgcaaaccttagaaattgctctttctaaatttctaacgccggattcacgtgtatacccgttaattatttctttaataccactgtcggtaatatttaaattatggctagtaagtccattatttttacgttgtttttgaattaaatatttttttgcgatattgagtttttcatcttctgtatatccagaaacttcaattatgtccattctgtccaaaagaggacgaggaatattttcaagactgttcgcagaagctatgaacataacgttggataaatcgaaaggaagctcaatataattatctctaaagcttttattttgttctgggtctaaaacctcaagcatagctgaagttgggtcaccgctgatatctttcgtcattttatctatttcatccaatagtataacagggttatttacattggcacgctttatagcatcaattattcttccgggcattgcaccgacatatgtttttctatgacctcgaatttcagactcattatgtacgccgcctaaacttagcctaatatatttcctgcctattgattttgccaaagagctgactattgaagtttttccggttccgggaggaccaactaagcataaaatatttccgtttaccttatttgtaagtttgcttactgcaatgtactctaaaactctttctttaaccttatccaaaccataatggtctctgtccagctgtgtttttgctgcttttatgtcaagagtttcatcgccggttatatcccatggcagagctagtatggtttctatatatccttgaataacagcatattcctgtgaatgagggggagttttagtaagccttgagaattcatcattcagcttgtccataacttcttttggtaaatttctgtctttgatgctctcacgatatttttttatatcagagtcgttttcttcgccttcgcctaattcttcctgaattactttaagtttttctctgagtacataatcacgctgattattatcaagattttcctgaacctgatccattacacttttctctatatcaagtagatcaatttcttcagacattattgttataagctgttccattctttcaagaacgttcactttatccagaaccgtttgtttaagagcaggttttataggaatatttgatataatgacatcagtcatttcaccaggatcgtcaattgcgagcagagcgcttatggcctcaggagatgccttatcatacagttcaagatagtcctctgtcaaacgctgaatttttcgaattaagatttgagtatatgtatcatcatcagaattaatatcgtcaagcttagtaacattaacttgtatatactttcctaaatcttcaaaatcatttatgcttgctcttgattttccctcaacaagtattcttatagaaccatcaggaagacgaagaatttgacgtatttcgcatatagttccaatttcagctaagtctgatttaaccggagactcaactaaaaaatcattttgataacacaaaaatatcaatttatttttctgcattgccgcttctacagcgtcaatcgaccttggtctgccaacatcaaaatgaagtgccatgcccggaaagacaataagtcctctaagcggaacgaggggcagtgtatatttattatctatcatatttattataccttaactttctatatgaatttaatgccgtgtaaaaatactcggcagaagttaattatactattaatatatataaatatcaagtatttccgcaaaattctactgtataaattcttataaaaacataagaagtttttgtgcaacgaataaacaaataaacaaaaatttacagattatagtataatagtcaaatttgcgttttaaatcaatataaattacttttatttgcatatcaattgaaatataaaatatattgtgatataatagataaaatattgggggaagtgatattatgagtttactcatatataaagcgttgtgttatttttttatatatggatttttaggctggtgctgtgaagtcatatatgccgcaataattgacggaaagttcgttaaccgcggatttctaaacggacccatatgtcctatatatgggtttggggttttatttgttttaactttattggaaccgattagagaaaattttttatttttatttatagggtcagttatattaacatcagtgcttgaatttataacaggatttttgcttgaaaaagtatttaaaatgaaatggtgggattactcaaacgaacgttttaatattcacggttacatatgtttaaagttttcaattatttggggattggcatgcttaatagtagtcgatataatacatccattttttatgaaggctgtggaaataaatccaataaatattggtattatcacaattggtatattaagtgttttatttatatctgacattatctcaacaattattggaattaacagaacaaacagatatttaaaattattgtcaaaatcaggcagtcagcttagaaagatttctgaatctataggtgaaaatatttctgacaaaacaattcaatttactcaaaaaagtgaaaatataaaaaatgatgtaaaagaaaaacgtcaaaaagccataaatgatatggaaaagcatagagcggctattcagagaaaacaagaggatatattaaagaatatgcctatgactgcaaaacgtatacgttctgcatttcccgacttaaaattatttgagtattgggataataagaataaagaaaataaaaaataatttataatataaaataaaatttggaggaagtaacataagtatgattaaaagattagtttctgtagtatccatcattttaatttccgcattgttattttgctcatgcaatcagattgcatcagttaaaaacgatgataaaataagtgtagtcgccacaatttttccggcctatgattttgttcgtgaggtctctcgcggtacagacgacatagatttaaaacttttgcttaagcccggttcggaagcgcattcatatgaaccaaccccgcaggatataattgctatacaaaattgtgatgtctttatttatgttggcggagaatccgatgaatgggtaaaaaatattttgtcatcgattgacactaatttaataaatatagtttctatgatggattgtgttgagcttgttaaggaagaaacagttgagggaatggaagaggagaagagtgcaaaagaaacatatgagccggaatatgatgaacatgtttggacatctcctagaaacgcgataaaaattgttgataaaatcaattcttcaatggcagaatcaagacctgttaataaagaaatttataataataacactataagttataatgaaaagctagaacagcttgataaagattttcatgaaattgtgaagtcaggcaaacgaaatacaatcgtcttcggcgacagatttccatttagatactttgctgatgaatatggattagaatattatgcagcttttccggggtgttcggaagaaacggaagctagtgcaaaaacagtttcatttttaatagataaaattaaaacagaaaatattcctgtagtattatatcctgaattgtcaaatcaaaaggttgcaaaaacaatatgcgagtctaccggagcattttcgctccagttcaattcatgccataatttaacaaatgatgaatttgaaagcggagctacctacttgagtcttatgaaagaaaatataaccacgctaaagcgtgcattaaactgaatatggagatattatgagtgattttagcagaaaaaatgttatagttattggcggaggacctgccggaatgattgcggcaggcacagcggcagaacgcggtcacaatgttaaattgattgaacagaataagattttgggcaaaaagctgttaataaccggcaagggcagatgtaatttaaccaacgcttgcgacgatgttgaaacactgatacaaaatgtacctactaacgggaattttttatacagtgcattttatacattttcaaatatggcggttatcgacttttttaataagcttggcgttgaaactaaagttgagcgcggaaacagagtctttccggttagcgataaaagctccgatgttgtagaagcgcttagaaattatattattaaaaacaacgttgaaataattaatgacagagttgattctatacttacaggtaatgataattctgatgaaaagagcagaatatccggtgttatgtgcagcaaaagaggaaaaatatcagcggacagagttattattgccacgggaggaatgtcgtatcaaaagacaggttcaacaggcgacggttatttctgggctgaagagcttggacacactattacggatattagaccttctttagttcctgttaaagtaaaagaagattggattcaagatgttttaggacttactttaaaaaatatatcaattaaagtaaagaactcaaaaaataaaactatatatactgattttggtgaaatgatgtttgcacattttggattaacaggtcctgtaatccttagtgcaagcgcgcatatgaaaaatattaaatctgaacattatatgatagaacttgatttaaaacccggactgagtgaaaagcagcttgatgaaaggattttacgtgattttagtgaaaatttaaataaagattttaagaatagtttaaataagctaatgcctaaaaaattaatagatccaattattgagatgtctgaaattgatccgttaaaaaaggttaattcaataactaaatccgaaagaactgcgttagtaaaactgctaaagtgtattaaattcagcgtagttgatttttgtcctatagagcaggctatagtaacgtctggaggaataaatgttaaagaaataaatccatcaactatggaatctaaaatcgttgacggattattctttgccggagaaataattgacgttgacgcttataccggcggatttaatttacaaatagcgttttcgagcggctttcttgcgggaacgtcgtgctgaactgcgctgaaatgatgacttaaagtttctgtatagagttgcggaaattacacagaatattattgataaagcatatgtaataacagcagtaattataaatcttgatatagtatctgtaactttaattccatttaaaatttcataagtcgaagtgattatcaaacaatgcacaagatatatgttgtaagaggctccggaaatgctgataaagaatccttttccacggctttctagggattcagtaagaccatacgcgtactggtaaaaaccaaatgttgagaacagacagaataatatcactattgtaggtgagaaaggattgtttataacaccgccatactccatatatgaagttacgcagtgaagtattgcaaaaacaagccagcctgcatagaccaaaagtcttgatttgcttaagaaacgtaagaactcattataatacattccggcgtacattccaagtatccaaaacaccaagtatgacggaaatatcttatgcgtatattcagtcgaagatatcagcattctgaatcctattgaacatacgacagctataaagattattattgtattaaaaagcttagatttatgcttgctaagtaaaatccaaagcggcataagcagataaaactgcattattaagacaacaaaataaaattgagcagataaatctccgttcaaaatatattttatcaatgaaactggattaaattcataaatatggaaagcataaacaaagatgatataatatatgacgaccataattatatacggcagatatatttttctgattctatctaatagaaacggcgcgtatgtaaattttctttcgctgaatttataaaataattttaatgcactggtaaaaataaaagcaggtacagcaaaagtagtgagtttcgtaactgtgaaaaacactatagataaaacgctccatttcggaaatacatttatgccctctgaaagcaaatgtattaatataacaaacatacagaggaagaattcaaaaactgaaacttccgtaatttttcttttcatataacatccctctacataatagtatttatattttacactattttcatatttaagtcaatgcttaataaaactacataaattttataaaaagattataaaaagtttatgtagttttattgtatattatagttgaatagttgtgcaaggtctggtataatcaaacttgccgatatacaacatattgtagaatatggaaattttatttaggaggaactgctatgacaaacttaggttggcaaggttttaaagatggtgtttggaaagatacaataaatgttgaagattttattagaaataattatactgaatataaaggcgacgaaagttttttgtgtgacagaagcgaaaaaactgatgctgtatataaaataaccagagaacttattctcgaagaaataaaaaagggaattatagatgttgaaactgaaaaagtttcaggtattgataattttgaccctggttatattgataaagataatgaagtaatcgtgggtcttcaaacggacaagccgttaaaaagaatagtaaatccatatggtggaatgagaatggttgaacaatcattaaatgagtatggatataaacttaataaagacattgagaaccatttcaaagaatatagaaagacacataatgacggcgtatttgacgcctatacctcaaaaatgagggctgccagatcagttggattaatgaccggtttgccagacgcatatggaagaggaagaattattggtgactatagaagaatcgctctttatggagtggatagactgattgaagagaaaaagaaagattttgaactaaaggaatctcttcctgcgtcagatgatgttatcagaatcagggaagaaatacgtatgcagattaaagctcttaatcagataaaaagtatggctgaaaaatatggatttgatatttctaagcctgcaaaagacgctagagaagcgatacagtttacgtattttggatatttggctggtgttaaggaaaataatggagctgcaatgtcatttggcagaaattctgcattttttgatatttatatttcacgtgatatagaaaatggagttttgacagaagaagaggctcaggagttaattgaccagcttgttataaaacttagattggttcgtcatttaagaacacctgaatataacgaactattttcaggcgacccaacttgggtaactgaatcaataggcggaatgggcgcagacggaaggacaatggttacgaaaacgtcttatagaatgcttcatactttgacaaatcttgacccggcaccggaaccaaatatgacagttttgtggagtaataatttgcccgaagcatttaaaaactactgtgcaaaaatgagcattgagacagacgctatacaatatgaaaacgacgaccttatgcgccctctctatggagatgattacggtatagcttgctgtgtatcatcgatggaattgggcaaaagaatgcagttttttggtgcacgcgttaatcttgctaaaactttactaatgtcaatgaatgacggtgttgatgcgctaaagggcttgaaggttttgaaatgtacagaaccaatgacagatgatgaatatttagattatgaaaaggttaaagcgtcatatttcaaatgtttggaagaggttgccgagctctatgtaaataccatgaacacgatacactatatgcatgataagtacgcatatgaagctggacaaatggcacttcatgacacagatgtaaaacgtttcatggcgtttggagttgccggactgtcagttgtagcggattcattatctgcaataaaatttgctaaagttaaacctatacgcgatgaaaacggtttagcttatgattttgaaaccataggtgattttccgaagtatggaaatgatgatgataaagtagacagcatagctgttgaagttttagaaaaattctttaatgaattaaagaaacatccaacttacagaaatgcagaacatacgctttctgtattaacaataacctcaaacgttgtgtatggtaaaaagaccggaacaacacctgatggacgtaaaaaaggtgaacctttggctcctggtgctaatccaatgcatggaagagacataaacggcgctttggcttcactgaattcagtagctaagctaaaatttgctgactgttgccaagatggaatttctaacacattttcaattatacctgatgctcttggaaagagtgaagaaacaaaggttacaaacttagttgggcttttagacggctattttaaacagggaggtttccatctcaatgttaatgtattaaatagagaaactttagaagacgctatggaaaaccctgataagtatccaacacttacaatcagagtgtcaggatatgctgtaaacttcaacagacttacacgtgaacagcagcttgaggtaatatcaagaacattccatgagtctatgtaacgtgtaaagtgtatttgtttacacgttgatgtaagagaagataatattaatattatagcaaacgccatctgtaaagaatatagctttacggatggcgttaaagcatttatttgttgctgaaaataatatattaaatttacgcaggtgatacattatggaaaatgaaaatataataaaaagtaatactgatataatcggtaatatacattcttttgaaagtatggggagtgttgacggacccggtatacgttctgttgttttttttcagggatgtagtttaaggtgcgccttttgtcataatcctgacacctggggaaccgatcctaataaagtaattacttccgccgatttaataaaaaaaatactgcggttcaaaccttattatgattcatccggcggcggtgtaacattttccggaggcgaaccgcttcttcagcctgaattcttgcttgatatattaaaaaaatgcaagcaaaacaatatccacactgcgttggacacatccggagtaggtcataaaggggacaaaaagttcagacctgattataaagaaatactcaaatatactgacctggttttgctggatgttaagcatactcgttctgaaatgtataaagaaattacttgtgtagatatgagtttttttatggagtttcttgacacgctcaattcatcagatacggatgtttggataagagctgtaattattcccggaataaatgataatatagattatataaaagagttagaaaaatttgctaaaaagattaataatgttaagaaatttgaacttttgccgtatcatactcttggagtaaataaatataaagagcttggtattaaatacagattagaaaaacttcctcccatggataagaaaaaaacgaaggaatgggaagaattattaaataagtcattagtgtaaagcatgaaatttttatatttttgtaggtttgtcaatgatgtgttacaaaaaagattaaaagagttcaccgaaattgataaaagagttgatgtagtcaatgggagctttccagcgtctactgatcttacatatccgtctccgtttatgtccgccgtatgcgctatcactgtattggctgtctctccctccattactgacagtctgtccttaacttcctgctccgtaattgttgttccgttgttcgatacaaatgccgcatatcctcccaggccttctgagtaatacatttctattgctgctgttccggctgactgcaatacatatttggcattttcattctttgctgtcgttactactaccaaatcttttccgctcggcgccgcattgtaactgtcgtgcgctacaatctttaccgttcctgttattactcctgcatatatctggatattctctccaaacatctgatatgggattgtatatactccgttgcttcctgttaagtatcctttgtttcctccgtttactgtgtaatatacatatcctactatatcaccgctgtttgccggctctacactgaacgttatatctgttccatatgtcgcttttccgtctgttactcctgtctctcctgtatacgctccatttgtcacagtattaaatgttacgctatactgggcttctgtatatgccgctgtcaatgttgcgtctcctgtcacttcatatgtactcaggtctatctttacatctccgctcatccagccatccggattatatcctgcttctgcttctattgtcggcaggtctgactgcagcaattttgagtttacatcctttgctatctctgtcactgctcccgctgcaaaacttccgtgtgttcccggctcaaatgttatcttgtattggcgcactgcctgagctgtcagacttgtatcttccgtatatgttcctgttgtcaaatctgtgcttgtataccctgttcctccgcttgttttccacagcggttcctctgttgtatcttttgccaaacggtagttctcgtttgcagttaccagtccctttatttgcgtatctgtcactgccgtagtataactgtcgtctgtgtatagtcctgctgtattatactttgtataatatgctgccggtgaacctgaaacagtgtttccatctccgcttgagagtgttacttttaggttatacagattaacggtttcagctgttgatactgctgctatatcagtatcagctcctgttggtgcaaaatatccgtccttcgttcctactgatacattagccgctgtttctattcctctatttactgtatactttactgtcattatagttacagcttcgcttgatacatcaaccgagctgcttcctgacgtatacgcaatcttattttgctccgctccttctccctgcaccaaattatatccgtttgtttttatagcgtctgacgcttctactgatgtcaatgtcatttttgtgctgtcatagtcaagagctatattaaagcttccgaaattagtcggttcactggacttaacttttaccgctaccgctatctcgtcaccggggttaaagttctcgtttgacggcgttactaattctgtaaccaactcatatcccaaactgtcagttattgcatatgtgctcaaatgctttaactttgttattacctttttgcctgctgtgtcatatgccgacgctactcctgatttttctccggcgtcatttatatacactactgatacttttgaaggatttgttactgccgcctcggtttcatacggcacttttagtgtcaagtttccgtttgagcctgctgagctttccggcaacaattctgtagttcctgacatcagttttacgtctataacttttgctccggacattatcatattatttactgtttcattttcgctggcatcatgaacgtcaacttttaaactaataccttcacttcctgcagtatttgaaatcttctcaaatgcagttttatcaagttctatctccgccacatcagtattgattaccacactgtcaggaactgcactgcttatactatctaccacgtcttttggaatactaacatcactgtttttaatttcactgcttggctcatcagttgttgacgcatttattacaggatttcctgtgtccgcccctgttattttgctgtcatcaatagtaacgtttttggcaaatgccgcagtaattaaaactccgttttcgggcattacaaaactataagttccattattttcagttattaccacaggatttgctccatcagtcaattcagtatatgttaaacttccgtttgcaaaggtatatccttcattcggttcaacagttaaaaccactgtgtcgccaatatttgcgtccggattttcaacactaactgttccccctacaattccagtatcaattgttatttttttagaaattgaagaaaatgctgttccatcataataatatgtaccggcatcaagttttgtatcaaaccatagagctccatcaacatttccgacagtatatctggattttttatcagataaaatttttcctgtcattaacgatttatcaccggcaattatatttgaagaatttccaaaatcaaattttgaatttgtggacttgaagtctacaaaaccaagattatttaaattaatagcactattcacattctcaaaagcaacagatgaattatcaaaattaaatccaagtgctgtataccaagagtagccatcaagatatataccattttcagagttctttacagtcaaattaatatttttaaaattaatatattgcgtatctgaatttttagttttaatcgcagatataccgttgccattcatatcgatactaagcgttggtggctgatttgttgaatcttcaattcctacaatattagatgttcctgtaaatataccacaagcatcagcttctgttcctgtatacttaatggaattatctccatacataaatatttgcatattatcatatgagtctataatagctttttttgaaagatttgaagttacagcaattttatcagtttcaattgttacattatttaatattagcagtttttcttctggaatccattttataccatattctgccagctctgaaattgtcaacgaatttagttctgaaccgatatcatctgcgcctaaaccacctgtaaatatatttcctgacccactgtttacataataataattactgtcttcatatgcagcgttgaaattccaaactgaattttctatactgtatattcctgacggaataatatttttatcataaatatacatatcagaaataaaattaatacttcctgaaccttctgcagcttcaggcttaacagaaaatgctttgtatttaacgttatttaatgtaatatcaccgcttagtttaattctattattatcattgttaagcgtaaacccaattgctttcgaaacattttctatattagtagtcccgccttgaatttgtatacttccattctcttcaatattaattgctgtagcggttataccatgtagattctttatacttgtagtacaatttgttaaagaaattgttccgcctgagcttgtttgaaatccatacacatatgaagatgaagatccatccaaatcaatatttactattgaatcagttaatataatagattcctttgtaatcacaaagcctttcaatgtatttttaatattaacttcactattttcagaaataatacttttattccccttcacacctgcagctccaccggaagaattaacattaattttagaattatttctaaacgtaaccgttccgctaaaatcaagaccgtttccttttgtatttgtaactgtaatattagaattatcaaaaatgacattttgcttagcatatgatataaatatacctgaaccacttgtataattagaatcagaaaaattaattttagcattttcaaacctaacttctccttcagaagaagattcagaatatataccatatcctccgccgctcatatttaattcaccatttgtagcagaatcgctggatataaatccatcacctttcatgaaaacagatgctgccgcatttgaagatgtagcgatagtattctttatattattaacacccattaatattacttttgtattagccggcaaatttattattccgctcacttgaccaaatcttgcaacttccaaagctacttcaatatttgcattataaagtgtcaaagtatggcttccatctgtgttatcttcaaaatatattccatagtccttttgctgctgctctgtcaaagggttacttgaagtaaaatcaagtttcttctcgcactttactgtaccgggagtttttgcttctcctgccggttctttatcagaatttggatatgtaaatgtcactgctaaatcatgtatattgctgtcgcccaacgattcaaaatatccgctttcacgtacgtccgagtatttatatgcaaacgctggactgctttcgaatatacgtacttctactccaaaatcttctcctgttgacaactgttcttctgtatatgtctgtaccggatgtaatgttattgtctctttatcgaaatcttctaatgttactccatcctttaacctaaaataaaaactcatcaagtcaaatgaattaatcgctttcgataacggcgttgtccatcctgctgtcattcttactgcttttcttccttctatatccgcatgatataattcatttgctactgctgcgcctgcttttgctgctacttccagcgctcctgacactgttattctattatcttgatccggctctgtatataataaatcactgtattgatcatttgataaatcaccaatcgcatataccggctgtatcttagaatcgtcatagtttaatactgtctccaccatctgcaagtttgcaggagctgataaattacatactatcttatatatttgtttattatcagattccctaactcctgcttcctgccaatttagagcaacttccggcactgtcacgtcagccagctctgcttcactgctactgtctataatttcttcattgttttcttctgtttttattttatcaacactgtcagaaatatttgtatcagacaaattattatcagcaaatacaaaagtcggcgatacgctgaatatcatcgctatagccaataccaaacttaaaataccttttttacaattcatttttattcctccatagattttcatatttaccattcacgttatttatataatttaattattcataagcaacttattcagctatggcgcttctttgataattcgcgagtaaaatcgaaagatcagccgacgtaaccattccatcaccattaatatcgccaatatcaattgatttttgataatttccaagtagtattgaaagatcagacgaagtaacctttccatcactatttaaatctccgccgtttaaaaccacctcagatatatttacaatattagaatttgatattacaattgctgattttctataatttaaaaagtttaatttttgaatatttaatatataagaaccatattcaatattactgaatgtatatcttccgtcagaatctgtaaccgctgtataattattttctgaatttgaaagcgtaacactaactccctcatttgatttgtttccgtcaagtgttaccattcctgtcaactgtccgtcactgcccgtctgaactatatcgcctccgctccaaactgttccggaatacaaatattcaccggcttttgtccccaaatgttttgttgagtcagcaaatataaattcagtatcaaaattcaatttaactgaatccggtcctgatgttgcacttggtctgtatccatttgcctctctagttgtgacatcaagaaccgccccatcagatatcactactttggccggcgccgccgccgaacattcaggacttccggttatgtcagctgaaaaatcacaaccactgtcaactgtcacaacagctccggcatagagttcaaacttagccgccggacgttcaggatattcagtatttacaagatttttaacatcatggaattcgtcataaaatacaactgtgccgcgtttacccgtagttgttggagtttcctccctatatcctccgtttattgttaatgtagaagattctaaaagatttaactcagaaccggtcaaaaatttaaaatcatcattaatcacataatttccgttatgaagattaaatgtcattatcccgttaattggatataaataatcttttgtgcttaggtcagtgcctacaatattaagagagctatgacttgcctcagcaccgccataaatatcgattgtagaacgtcccgactctttatcaagagtttttataacataaccgccgtcatttattctaactaaaccattatttttatcaaactgcggaaatcttgttcgattatatcctccgcccgcatacatttttacggttcctgcatatgtagcacgcgaatcaattttaactggcacttgaatatttctgcattcatactcgttcataggatatattccttcgtcaagagtaatagttgccgcctggcttccgcctctccagctcttaacaacatataaatcatagactgtagacgacgcgtttgcatttacttgtccatttcctgaaatatatccgcagcagtcaagcattccatatgcaccgacctcaattgtgccgtccaatattatctcggcatatcctgctgaaatattttggtcaaagttgccgcctcccgggcgtccaaccactgagtttattaaaaccttgcctaagatattcatcgttacattttgaggtatagtaagcgtgcaatattttgactcttttccagccacatcagttccgtccggacaaaagcctgtttctgtatcataaccggtatcaccgtccatacaagacaataaaaggaacactcctgatggtacagtaatgtcccgggtaagttcataatcttttaatagaacaacggtatcgccgcttacagcaccgtcaagtgcttcttccaatgtattatatcctgttccgtttctctgagctatcgtatcggcttctgtctgtgccaacacaacttccggtaaatccaaagtactcctgttaagctcgtctgaaccagcaatttctattgttatatcattactgtcggcggacaaaagcatggcacccgaaaaatccggatctgaaaaatatacattaggttcgttagcttcattaaactcagtttctgcaaaagaaaaagtacaaaaagaaaacgaaaaaaatattgataaaaataaaatactaaaacgtaattttgacataaaattcctctccctaaatacaaatatgacataaaattattatatagacatattttatcataaaaattacataaatctctatgttatatttataacacaaactataaccacaataaaaacataatattttttaataaaaaacagttccaagagtattcttggaactgaaaataaaacttatatttttactcattaaaattattttaaaataaactgtatgatacttaaaaataacctataatagtattttgctatttatcaagtccctgcatatactcatccatggcgtcggctactaattttgaatattttaccgcttcaacaactgtttttgctccttttacaacatctccggaagcaaatatcccctctctggttgtttcaccgtattcatttgtaaccaaaagaccctttttgtttgtatctatacctttggttctcgaaaggatttggtcttgagcgccttgactgattgatataattactgaggtagaaggatataatttttcgcttccttcaacttcttctattgaaccgtcttcgtttactacagagtctttaaaaataacaccgtccggctttatctctaccggaatcttacaaaattcaaaatcaactccgtcaaactttgcatattcatattcaaggtcgcttgcggcaactttatcacttctgttaaacaccgtaacatttcgaacacccttgcggatagctgttctggcaacatccatcgccgcatttccggctccgatgattataagattatcaccgagattgtactcgtcaggattaattaaataagctattgcatagtgtacgtttcctaaactttcacctttgattctaagactattcggtttccaaacaccggttcctataaataatgcgtcatatccgtctctaaatatatcttcaatacttatagcccctccaatagtagcgtttggccttatttttataccaagctcgagcataagtgatttatatttttcaagaatagtttttggaagtctgaattcaggaattccgtacctaagaactccgcctattttatctttagactcaaaaattgttacatcgtaacctcttcttgcaagttctatggcgatcgtaattcccgcaggacctgaaccaactattccaaccattttaccattgctctctggtttctcaaatttgagacggtcaagataagtagtggaaatataattttcaatactgctaatatgcacaggatttccttttcttccaagcacacaatggccctgacactgtttttcatgcgaacataccaaagaacaaacaactgataacggattgttatcaaaaagcatttctcctgcctcttccatctcaccattcaaaaacatttgtatcatctttggaatttcagtgcttatcggacatccttccatacacattggctttttacaattcagacagcgtctcgcttcgctaactacatttaatgccaattcaaacacctccaatttatatttttatcctactatataacaagttaaaaagtcaatttaaaattcattttataacaataaattatttaaatataacaaaatattcaatttgtcataaaattaacattctcatttgataaaatctatagcaaaggcgctatcaaccttataaccctgcccaatattctagtaaccaagcttctatttttaatcgtatcttcagtaacttcttcacataaactcagcgtatgaacaaaatcactttccatatctttaatctgaggcacatcaaccaaataagccgcacactcataatgaagataaaggcttctataatcatgattaatggttccgattatagcacgcttatcatctgaaattgacatttttgagtgaacaaatccaggcgtatattcatatattttaactcctgctcccaaaagttctctgtaataagttcctgcaagccaaaaagcataaggcttgtccggtatatgagggaggattatcttaacatcaacgccgcgttttgccgcaaactttaatgcctgcatcatattggtacccagaacaagataaggcgtcattatgtgaacataatctttggcaagattaagattattaatatacatagtttcaccaaatctgtcctttttcagagggctgtccgcaaacggtataatatatccctctccctctttaaaatcaccatcagaagcagaatttatatatttatcataattatcttccttaactttattaattgaagtattccacatctgaagaaacatggaagtatatcctgataccgcgtcacctgttatttttatcgcgttatctttccaatggccgaatctttctctttcatttatgtactcatcggcaaagttaacgcctcctgtataaacggttttaccatctattaagataatttttctgtgatccctattattttgatatgttgaaaaaaaaggaactataggcgcaaacactcggcagtttataccaaattttctaatcgtatcatcataatcatttggcagaagagacatacatcccattccgtcatacattaatctaacttctacgccctccttagctttttctttcaatatttctaaaatttcaggccacattctgccgtttaaatttattataaacatttctataaaaataaacttttcagctttccttagttcatcttttaaatcaataaacatttggtcacccaaagaaaaatactctgccgacgaatttttatataccggaaacccggaataatcatatatatattttgatatacctatatcctcttgataagtttcagaaaatttttgtaagacatcagtctcctgttttgtatatttaagagtacggcctcttatttcgtcactgtgaacagcaattttttttgaggctctgttataatgcagaaatatataaagcaaagttccgaaaattggtataatagcaataagcattacccatgtcagtttaaaccccggttcttcttctctgttaatttcatatataatcaatacagcgctcagaaaattcataaaagtataaaaatatttagaataatcaccaagccaagcgctgagcaataaaagcacagaaagctgtgctatcatcataagaaggcaaaacaatttattagaatatattattttaaaaaaacgagtcatcatatcaccccaaacctaaaataaaattggcgtataaatcaaaaaaatgaaataaaacctgtaattattaaactatttaaaaagtcaataaacaacgctccaactatcggaacaactaaaaaagcctggggcgacggagcatatttatctactatagactgcatattcgccatagcattaggagtggctcccataccaaatccgcatgctcctgctgtcatcacagcagcgtcataatccttgcccatatacttaaaaattacaaaacgagaaaataacatcatcaaaataagctgggaagcgagcagaatcaacattggcagcgctaaatttgataaagtccatagttctaatgtcatcaatgccatcgataaaaagaaagacaatgaagcttcgcctatttcctgaatttccataaaataaactttaaacttccctgtgaaatcagaatagtttctaattgcagctgccacaagcattgcgcctatataggaaggaaactttaatcctgtcaatttcaaaacatatgaaaccaaagtaccaagtcccatagcaattacaatctgataaaaaccatatgaaaatccgctggctataaactccttaaacccggaaaccgagtcctcgatatcagggtcatccaatctatgttctacttctttatagagatttttcttttcaatcaatcttttagctattggtccgcctatggcgctgccagcaaccaaaccaaaggttgctgaagcaattgccacagatgtggctccgtcaacgcccatagcttttatagtgggaccaaaagcgccggcgcttccatggccgccaaccatgggtatggatcctgtacatagagaaagcaaaggcggaacattcaataatttacctattcccagagcgataatgttctggcagataattaaacaagcaataagaacaaggaatataaatatatgctttccgccttgttttaatggctttattgaagcattataaccaaccgtagtaaagaatgcaatcataaaaaaatcttgcaatgtggtgttaaagttaatatataaccagccaaactcatgacatataaaaactaatacagaaaaaatcagaccaccgataaccggagatggtatgcagtatttttgaaaaaaatgtattcgtctttttacaaactttccaaagaacaatagaccagtagccagcgctaatgactgaatcatatctaaatatattgtcatttactgcaactccttcttaaatgtctcataatcgtctttattcttaggaacaattatttcatcagaaattattttttgttttatgttctgtgttttttcatacaactcatctgaataattgtcatggtttgacggtatatctacagaaccattttccaatccaaaatagtatgtgtttttattgctgtttttaaaattatttttaattatatcctcagatacatattttgcaattgctctgcaatgtttcagcgcagacgtaagaacatttttgggcgcaatctcactctgatctacatcaacgccgataacccacctgtcattttgaaccgcagattcaataactccaagtccggcagctcctgcggcctgataaatcacatcattaccggctttatacatttcatcgccgattgaaaaagcttttgctaaatccacataagaaccaacatattcagaagatatattaatattagtttttctttctttagccgcaaactcaacaccggctttatagccatattcaaatgttgctatattatcgtcatttattccgcctacaaatcctacttgatttgtattagtggtcatccctgcaatatatcccacaagaaatgatgattcctcagttctgaacacaacgccgaacagatttgttgttttatcatcagagggactgtcaagtacaacatatttagattttgtattaaactccgcagctttttttgcatcatcaaaaaaataagccccgcaagcccatactaaggaaccattttcaccggcaaagtccagcttatttaaaaaatcactttcatttttacatgtcaaactttcaaaattaaaattattatcaccgcaaaaatcgtttactccgctttttgtttcttcaagaaaactatccttttcaactgaatccactactatatatatattatttcttccactctttgtatttccacaggcggataataatattgtcaccacaattacagacaatacactaaaaaacacactaaattttttcatattatcccccttaaaataacacatcaattattatttttagtatatcataatcacataaatttgtcaaagaaatcatataaaatttgtttatattttcaaataaaaaaacgcccttaaagggcgaaagtttatatatctaaatttgcataagcattgagcgacaagtcggcaatatttccattttgatactcataaaaacctgcgcatcctatcattgcagcattgtctgtacagaggataggcctagggtaacaaaactcaaattttttctcagcagctttgtcacttatagtttcccgtaacggaatattagacgccactcctccggccaatgcgacacggtcaacacaatactgctcagccgcttttataaggtgatccgacaatacgtcaactactgcttgctgaaatgaagctgctatgtcgtttttatttatctcaatccctttttgctcagcattatgtatataatttaatactgatgttttcactccgctgaaactgaagtcaaatccattacttcccatattaacacgcggaaaatttattgcatatttatttccggattcggcagctttttgtatctgaggtcctccgggatagccaaaacctaaaacgcgcgacactttatcaaaagcttctcctgccgcatcatcattggtttttgctataacatcatattcaaaatatgatttaacataaataatatggctatgaccgccggacgctaccaaacaaataaaaggaggcttaaaatcaggattttccaaataatttgcgcatatatgccctttaatatgatgaaccggaatcagcggcttatccagcgaatagcttaaccccttagcatatgacacgccaacaagcagcgctcccacaagccccgggccatatgtgaccgcaacagcgtcaatatcctcaaaagtcagattgcagtcatcaagcgctttatcaacaacagcgcttatgttttcaatatgttttcttgaggcgatttcgggcaccacaccaccatatagtttgtgcaattcaatctgagtatttataacgttagataaaatattagttccgtcttcaactacagctgccgcagtttcatcacatgaactctctatagctaatattttcataatttaccaccttctataaatcctttgtcattaatatagcgtcagaattatctttataatatttttttctttgaccaactgatacaaatcccattttttcatataacgatatagctgcaatatttgttgattttacttctaagtttatatacttgcatttattttttttagatttctctattatataatatagtatagttttaccgattccctgtctccaaaactcaggagagacagcaatattagttatctcagcaaaatccgcaatgaaccaaacacagcaatatcctagaatagcttcttcgtcgtttgacaaagcaacaataaatgaagaaattttgttctttacttcactttcaaacattaatcttgtccatgaatctcccaggaaacatttttcctcaatcttaagaagcctgtcaatatgactttcatccataggtttaaatatcatatccataactattcattagcctttatacgtaatataagtttttcaatcaaggattttatatcaatcatacagctcttataaagattcaaatctccgccaaaaggatcagatacgtcacttttctctccaacaaattccgcaatcgtataaaccttattttttaaatcaggaaattcatttattatcgccgacttatgtgacgatgacattgtcaaaactaaatcagcgtcacttattaactgaaaatccaactgtttgggctgatgttttgaaatatctatgttttcaacactcaaagcgtccactgagttttttgacacttttgaacacggcaatacatagataccggcagaacttgctctaacattcaaattttcattttcagccatactgttaaatattccttcagccataggacttcggcaggtatttccggtgcaaacaaataaaatattatgaatatcttttatttcagattttatattaggattaattctagattttttaaaataatcttttgtgtcaactattctatttccggcagctctgtataatctgtttctaacaccgctccatttatcagtacttgggatttcaggagcaaaaactctcttcacgccacggttgtccatttcccttaaagctttaaataaagaacttgccgcttctttcggagacttcatactcccaagcgagataatctcgatattgggactaatttttttatttagttctgaagaaaactcgtcaaatattagaataccgcatctgtctttctgaccgtttacgcaattcactacttcctcaaccgaacctttaacaatgataacctctgcttttggagaatagtgcttatatttaagacctggagatttgggcttttcattttcttttacttccgatactgttttaactttacaattcagtatctgttcaatttgttcagccgtaacatcacccggtctgtatataataggttcacctgataaatctataaccgtggactcaataccaacattacagtcgccgccgtcaattattgcatcaacccttccgttcatatcgtctacacaatgtgcaaacgctgtgggacttggtttgcctgacaaattagcgctgggcgcggcaatcggaactcctgaaagttctaaaagtctctttgcttcaggctgtactggcattcttacacctacggtatcaagtccggccgttacttcattcctaattttgttgcttttctttaagataattgtaagcggtcccggccaaaatttattcattagttttttagccgattccggaacttcacttactatctcgttcaactgcttaacatcataaatatgaacaataagcggattgtcagccggcctgccttttgccgtaaatattttttttactgcatcaggatttaacgcgtcagcgcccagcccgtatactgtttcggtcgggaaaacaacagttcctcccgaccgaattatctcagctgcaatattcaaatcattctcactatttgataataatttagtttccataaacaacacctgaattaattatatatttccctcagcttgagacttcagcttttcactttggtcagttgtaatcaaagcgtcaataatctcatctaaatcaccgttcattatctgttccagtctatacaaagtcaaaccaatacgatggtctgtcattctgccctgcggaaaattatatgttctgatacgttcgcttctgtcaccggttccaacttggctctttctgtcagcagctatagcggcgctccgctcctgctccattttatcatatagtcttgaacgaagcattttcattgccgcttccctatttttatgctggcttctttcatcctggcatgtaaccactattcctgtaggtttgtgagtaattcttatcgctgattcagtcttgttgatgtgctgaccgccggcgccgctcgaacgataagtatcaatttccaaatcatccgggtttatctcaacctctacatcatcaacttcaggcagaacagcaaccgtaacggttgaagtatgaattctgccgctcgattcagtttcgggcactctttgaaccctatgaactccgctttcaaacttaagccggctgtaggctccttcaccattaatcataaacgttacttctttaatgccgccgattcctatttcacttatattcaaaacttctattttccactttttactgtccgcatacattgaatacattctgaaaaggtctccagcaaacagtgccgcttcatctccgccggcaccgcctcttatttcaaccataacgtttttatcatcattaggatcttttggaagaagcaatatctttaattcttcttcaattttttcaatattggctttagctgtttttgattcatcaacaagcatctctttaaattctttatctgtatcagggtcatccattaatgcgttagcgtcttcaattgtttccatattttttttatattctctgtacttttcaacaattggagtaaggtcggaatgttccttacataatttacgccaagtctcctggtccgcgatgacctccgggtcacttatcttttttgccagctcttcaaactgttcttctaaaaatgatagtttttcaaacatcttattctcctcatagttttaattatatctcaccttttgattttgctttaagatacgcgttaataaatccgtcaatatcaccgttcataacagcgtttatattacctgtctcatagtttgttctatggtccttaaccatgctgtaaggatgaaaaacgtatgaacggatttgatttccccatgcaatttctgtctgtacaccctttaaatcgtcaattttgtctttctgttccctctcagcaatctcgacaagctttgattttaaaactttcatagcagtttctttatttttatgctggcttctttcattctgacatgtgaccacaatacctgtcggcaaatgtgttattcttatagcggattcagttttatttatatgctgaccgccggcgccgctggagcgataggtatctattctcaaatcctcaggatttatctctacgtccaactcctcgtcaagttccggtattacttcacaggaagcaaaagaagtatgacgtctggcggctgaatcgaaaggtgaaattctaacaaggcgatggacgcccttttcagattttatatatccatacgcattcagtccctcaatagaaaatgtcacgctttttataccggcttcttcaccgtcaagataatcaattacctcggttttaaaaccttttctctccgcccacatattgtacattctatatagcatttcgcaccaatcctgggcttcagttccgcctgctcccgaatggagagtaataatagcgcttaatttatcatatttaccggagagcagtgtatcaagcttcatattgtctattttttcctgaagctcgctatatccggactttacttcacccaatacgctgtcgtcattctcttcaattcccagttccacgagggtagaaacatcctcccactggtttttaatatcattaaaaccctgaaccttgtttttcagcgattttattttctgcagtatctttccggctttatccatatcttcatagaaacccggctcaaaagatactttttcaagttctcctatttcacattcaactgcggacaagttaaagtgaatccctcaattcagtaatatctttttccatgctctcgagccctaacttaaactcatcaaacgctatcactttatcacctcaataaaatttatttatatagatatatagttatatatttccattatcacggtccttatcaagacagcagttcttatactttttacctgaaccgcatgggcaaggatcgtttctgcctatctttgtaacccttcttatcggcttctttttaacagttccatctccgcctgcattttcagcaatcggttttgctacctgctgtctctctatctttgactgaggtattacatggaacaaatgctttattgtatcctctttaatggattctgtcatctcttcaaacatatccatagcttcaaacttatattcgattacagggtcatgctgagcatatgcgcgcaggaaaataccctgacgaagctgttccatattatcaatatgatccatccacttctggtcaacaacacggagcaatattatacgctcaacttcacgcatagcgtcgccgaacatttcttctttctcagcatattttttctcggcatcttccattacgtaatcagtcagtctgtcctgagtcattttgtcaatttcaacatcagtgaatttcaggaaatcttccggcatttcaccaagtatggtttcaagatggtcttttaagccttcccaatcccattcttcaggagtatttcccttgtcgcctatatatagaccaattacaccactgaatacgtccttcatcattttcatgatgctgtctcttaaatcttcgccgtctaaaacttggtcacgctgtttgtaaataatctctctctgctgattatttacatcgtcaaactgaaggacattttttctgatatcaaagttctttccctcaactcgctcctgagcagtttcaatagctccgctgagcattttgctctcaatcgcgtcatcgtcttcaagtcccagcgtattcataactttagaaatacgctccggcgcgaacaagcgcattaggtcatcttcaagtgaaatataaaatttagatttacctatatctccctgacgtcctgaacggccgcgaagctggttatcaatacgcctgctttcgtgtctttcagtacccataatatttaaaccgccggcttcaagaacttccttttgctccggttctatttcagatttaaatctatcgtttaattctttaaatgttttgcgcgcttctataatttcctggtcgtctgtttcggcaaaaccagttgcctggttaataagctcctctgaaaatcccatcttttccatctcatgcttagccataaactcagcatttccgcccagtacaatatccgtaccacgtccggccatattcgtagcgattgttactgctccttttttaccggcctgtgcaactatttctgcctctttatcatggaacttagcatttaagacattatgttttattccgcgctttctgagcattttactaagcttttcggatttttcgattgacaccgtacctattagtacaggctgacccttttcgtgagccgcagccgcatcatttataacggcattaaacttagcgtcttctgttttataaacgctgtcatgctcatcttccctttgcagaggcctgtttgtcggtataacaataacatcaagcttatatatttcctggaactcttcttcctctgtctgtgccgtaccggtcatacctgataatttcttatataatctgaaataattctggaaagtaatagtagccaatgtttttgactcattttctacagttacgccttcctttgcttcaatagcctgatgcaaaccgtcattatatctcctgccgaacatcatacgtcctgtgaactcatctactataataacttctccgtcttttacaacatagtccttatcctttttcattacaccaatagctttgatagcctggttaatatgatgagacaaagtcatatttgccgggtcggttaaattttcaacatgaaaagcttcttctgcctttttaacgcctctaggcgtcagcattgcagttttagctttctcatctacaatataatcatattcgttaagttcatcttcgtcttctacctcaacctttgagtctgtttcaactacctttttgaattttaaagtctttgcaaacctgtccgcttgagcatacaaatcagttgacttatcacccattcctgaaataatcaacggcgttctggcttcatcaattaatatgctgtcaacctcatcgacaattgcataattatgtcctctttgaaccttattctctttatatatcaccatgttatcacgcaaatagtcaaagcccatttcgttatttgttccataggtaatatcagccgaataagctctcttacgctcagcattgtccatatcatgaataattaagccaacgcttagccctagaaagctatatagttttcccatccactcactgtcacgctttgccaaatagtcattgaccgttacaatatgaacgcctttgccttcaagagcgtttaaataggccgggagagtagcaaccaaagtttttccttcacccgttttcatttcagctattctgccttggtgaagaacaacgccgccgacaacttgaacagggaaatgcttcattcccaaaactctccaggcagcttcacggcaaaccgcaaaggcttcaggaagaatgtcatcaagtgtttctccgttacttaaacgttttttaaaaacttcagtcatagctttaagttcagtatcgctctttttttccataacaggttcttgttcgaggaccttatcaacaataggatagatttttttcaattccctgtcgctgtatgttcctattactttctcaattatcccttttatacccataaaggatacctccaaaatctcatattattttcaaaattaatataataaatctataatttatactttgtaatttccataccatttatgttatatgttaaacaaactgtttctaaatttaaacacatactggtatattataactccaaacaaattttattgcaagagttttgttacactaaataaaagttcgtaggcttatatatttaaataatgtaactatatgattaaaaactgcaaacaaaaagcaggcattcacccataaaatttggcgtgtatacctgcgtaaattatatatttagaaaatttatacatattttctgtacacaaataataacacggccaaataaaattatataaccgtattatctattgttttatctgctctatcgcattcaaagtgtttgtaacaagaagttcaggcagtgcagaaccatctactttccagcttccgccctcttttttcatatttacatcaatagttttcgtaacattaggaactccgccgttatccagcacatttgcaagctggtcgtccataagtttttgataatcctcttttgtcattgtagcaagattattctgatattccggacttgagaccatcgcagcaatattttctatatatttctgcattacttgagacgcgtcaataagagtaatatctgcattaacaacagccttttttgcacttgacgcagtaacagaattaatatcatacgtcacattctttaacgatgacagaattgcagctcttaaatcagtattatcatttatctcaactgaatcacagtagttttttatctgctcaacattaccggatttaaatgcctccatggtttctgaaaaagcttgttcagcttcctgtcttgcctcttcagtgtttccgccgcatgatgtcaaagcgccgataattaatatcaaactcaaaagcaaagcagtacaggaaaaaaactttctcaccattatctttcccatttcatcactcctaacaatttataactatgattatacactaaaatattaaaatgtcaacattttatatgaataaaaaaaggatacccaaaacaggtatcctgaaataaacactttacttataaataaaatattaatccactatgtctatttttctactccgcagtacatttttgttgccggtctattttgaatttgatccaaggcttctccaaatctttggaaatgcactatttccctttgacgcaggaattttataacatcgtttacatcagggtcgtctgatactttcaaaatattatcatacacaacccttgctttttgctcagcagccaaatcctcggttaagtctcctataggatcgcctgttgaagctatagccattgcatcaaatgggactcctgtagcatcagccggataaactgaccttccgtgattcatgaaataagcgcctaaaggactgttagcaatttctttatcacttgcatttttagctaactgtctcaccagggttccaacaatttctaagtgtgcaagctcctcggttccaatatccgtaagcaaagcctttgtcataccgtttggcatagcaaaacgctgtgataaatatctgagcgaagctgcaagttcgccattaggaccgcctaattgtattatataataaatcttatataaatctttatccttcttttattcttagttgtctgcttctttcgggcaatctattattatattgttttccacagctgcaaataatatgaaacgcataatttactactttatttctatctatgtaaaacagctcctttttacaccgtctgcaaacagccactccatttataatatctatataataattttctgttgtatcaggattgccttcttctgtcctataaacaacctcagctccgcatttacataaataaactaaaaacaaatatttataatctctcaatattattcgtcctaaacgttcgccgcattgcgtacaaaaaacttgaccataattttgtcttccgattctaatattacgtctgtatgcttccctatgcaaatatatcactcccaaaaaactatatgtaatacctattttaaatatccttctttgtcttttattattaaactgacaaaatataggatattttatcaaaattctcaacatttcaaaaggaaatgtattgctcaaattatatattttgtaactaaattttactgcaatttttagaaattgatatatctattttatataatatactcattttataatttcaacttatttttttgcaataaacactaataatatatatattataattagttctatttatccactattcactttatattattattttttatatacgtattatattcgggtttccaaactgctttctgtaatccattgctcacgtattcagaaagaggacaggcaatatgttcaataaaatctatactataatcatatggtttagtactgccatcagataatattactgatgaacttgcagaccatggctttatattccatttttttctgtttgaaatatcattattttttattccattttctttcataaaaccacctctgttaaaaaatatacttataactgcttatccaatataactctaaaatctatatttttataaaaaacaaatttataaagttcatattaacttaattaaatacaatattttttacagaaatataagctctaatctgaatttttgtgttatctaaaatggattttttatatattttttaatttattatgattgctagatacaaaaccgtcatattctttatagtgtacttgtatatattatttgaataatcacaattttctttttattatatctaacagaatactatgaatcaggtgaaattatgaaaacagcagcttgctatattcgagtatcaactgaagaccaattggagttttccccagacgctcagcttcgggctatgagaaagtattgtgacgaaaactacttattgctgccggatgagtttatttatattgatgaaggaatcagcggccgcaatgcaaaaaaacgccctgcatttcaaaatatgataaaaaaggctaaatcaaccccaaaaccatttgatgtaattttagtacataaattcgaccgctttgccagaaatcgagaagacagtgttgtatataaatctttattaaggtctgagctaggcattcaggtattatcaataacagaaaatatcggcgatgacaaaatgagtgtaattatagagtcaatgcttgaagccatggctgaatattattctctcaatctttctgacgaagtaaaaaaggggatgagcgaaaaagcgaaaaaaggcggcgtacaaacaaaaccatctttcggatatacggttgttgacaataatttttcacctattgctgaagaagctgttatagtaaaaaatatatttcaaagatttgtttcgggtgagtcattcggacaaattgcagctcgtttaaattcacttgggttacgcactaaacttggaaatccttttaggaaaagaactatcgaatatataatatccaatccagtatataccggaactttaagatggactcataaccgaaaatccgaaaatattaatgacactatttatttagaaaatcaacatgaacctattgttgaaaaagacttatggattaaggcacagaaacgttataataaaataaaaactattaaccgcaaacatttgaaagaccaagctgacaagtcatactggctcagcggtctgttggtttgcggcagctgcggctgtacactcgcacgaagcggagattatttgcagtgctgcggatatattaagtccgcttgcaatgtctcacattcaataagtataaaaactgctgaaaaaatagttatagaacaattgaaagcagactgtttaaaagcagaatcagctcagataataaaaaacgcaaatacaaaaaataatgatgaagtattgttatataaaaaagctgaaaaacgcttaaaaaaatcattagacagagctaaagaagcatatctctcgggaacagacactttagaagaatatagtaaaaacaaaataaaactgcaaaacgaacttaaagaaatacaaaataattcaatttgcgatatagcagataatcataaatatattaaacagacaaaagatattttagattttattcaggataaagatatttcagacgacgataaaaataacgcattaaaacaaattgttgcaaaaataatttatattaaaccggaaaagcatctagaaattatatattattaatttattataaaaagcaattaggaccgccgtattggcttacaatatagttagcaaggctaggattcgtagtttttatatttactggatattgtaattttttttgataattccacatatattcttccctccagattatgtgttaagttaaacaattatttttataaaagtaattaaataaatattgtcattggcttttttgtcatgcctgaatatagttatcaaacattatcccacggccatggttcttcaatccaatcaaaacattctgtgttagtcacattcatagtagttaaaggaccaaacttttcctcaaactctttacttaattcctttgccttatcagccattcttctgtgcatcataaggccatctctatcatttggatgagtatccaaatataggttccattctttttccgcaaagctataggcggataatttttttaataactcttctctcgcattcatattacattcctccgtttttaaaaattatgtcgccttttgtttgctttccatacacacccataggtttatttaaaatagggaatatagttccttccttaagaccgtactcaggatcaaacaaatttctcatttcggcctgctgcataggcacataggcatagccaacaagcggcatttcaagaggcacggtttcatttgcaaatggcataaaatcattcctttcaaattagttggctcgaataattaattaatattttgtttcgtcaaaaattgacatctcaagcctgatatattatatgattatataagtaatttgtgctagaagcctttaaggaatatattatttacatatacaaataccggcaagatagtatttgggagattaattcaaaacagttcactaagattgtggtaaaagctataataaaaaatcagtatataaaaaacactgtaaccaattaaaatttgattacagtgtcttttaatatcatactatttttataagacggtatcttaaccgtttatccagctattttatatcattttttaagaattcgcgtattgccttttcaaccatatcaacctcttttttaaactcatttgccgacaccctatatgcaccgttcccaaggattattaactgttccagtccgtcagaagtcgctactctaactctatgttttttacttagctgatgagataccttctcaatatacatatcggcagtttccttttctttggtataaacaatatttatattgtgatatttttcaatttcgcccgggttatttttgaccttataagcgtcaaacactaatattacctgacacttgcaaaatccctgatagttacacaaaatatttataagcttgtgcctagccatatctaaattttcatcagcatattctttcaaattatcccaagcatatataatattgtatccgtcaactaatagataatcctctccctgttcttttttaggtttattctttatcggcttattgttgttaacatgagacttttttgtatataacgcagaataggtatcccgttttataggtccgtaagtgttttcaaatattttcattaattctttatcagttacaacactgctgatatattctgatgtccttttctctgaaacatcaatttctttttgtaaaccatctatatcaaaaccactgtcaacatgcatataatcccgaacttcattccatttcacaacaaatcccgctccatgagaacaaaatacagaatcagcagtattttcaatatctctttcactgtcatatccgattttttcaatgacttcatcggaattattacatggctcatagccgtttggcaaacatgtaagtcttcctctgccttttgtatacatactgacttcactttgataatccatcatcccggacaccggcgcagatcctgaaattactgtcatatcaacgccattattctccggctgtgaaaatcttcctcccatctgctgtatatccgtcattgctctgcctatcgaatcagtcggaacttctaatttaaactcataccaaggttccaggagaatgttcttagtcatttttaagccctgtctgacagccctatacgttgcctgcctgaaatctccgccttcagtatgtttttgatgagcccgtccggccactagtgtaatttttatatcagtgattggggaaccggttaatacacctatatgagtcttttcttttaaatgcgtcataatcagtttttgccaatttttatccagtttatcttcattgcacttattataatactttattccgctgccccgctttcccggctgaagaagcaaatgcacctctgcataatgtctgagaggttcataatgaccaacgccttcagtctgttccgcaattgtttcacgatacgctatatttcctcttacaaagtcaattttcattccaaatctgtcaaaaactatttgcttcaaaacctcaagctgtacctcgcccataagttgtatgtgtatttcctgaagctgttcattccacataacataaagctgcggctcttcttcttcgatctttctcaagtttgaaagagcgttatgcaagtcaatatcagaaagcaattcaactttataagaaagaacaggcgttaatagagcagattgagaattctcttcatctcccagcccctctcccggataagtgtttccaagaccggtcacagcgcagattgttccggccttaacttgttcagctgcatgaaactttgttcctgaatatatccttatttggtccactttttctgaccagttttctccatcagatgttgttccgtccagaagctgctttacctttaaagttccgcctgtaatttttaaatgagttaaacggttaccgttgccgtcgtctgatattttaaaaacttttgccgcaaaatcacttttataatttatactttttgtatacttatctaatcctcttaaaaactcatccacaccactcagcttaagcgctgatccaaagaaacatggaaaaacacagcgttctgatatagcctcctgaatatcagattccttaatttctcccatatttagatactgctccattaatttctcactgcacattgctatattgtcataaaaagcttctgagccaaaatcagacgagaaatcaacacagccatcgtccagtttatctcttaaattcagaattatatctctatggctgctttcagcaatatccatcttattaataaacaaaaaacatggtatttcgtatcttttaagcagcttccacaaggtttctgtatgactttgaaccccctcagagccgctgattactaaaatagcataatcaagaacctgaagggttctttccatctcggttgaaaagtccacatgcccaggggtatcaagcagggtgaattcagtatcattaatgttaaatacggcttgcttaagaaaaatagttattcctctgtcacgctcaatcgggtgtgtatccaaaaatgcattgcgatgatcaacccgtcctaattttcttatttcgcccgcctgatataataggccttctgaaagcgtagttttacctgaatctacatgagccacaatgccaattgcaatttttttcatatactctcctaccttgaaactttgaataatagctattttaaatcactgactttggaaagagaaatattatattgcttgccgcaatcacatataacatgaaagccacaattaatgatttttcttttatcaatataaaataattcttttccacagcgccggcacgatgcaataccatttttaagctctataaaataattttgcgtattatccggattttcatactttgtttgatatacaacttcacatccgcatttgcatataaacacaagatataaatatttatagtctttactaattacatgtccaatccgttctccgcattgagtacaaaagatttgtccatagttttgtctgcccattctaatattacgtttatatgcttctctgtgcaatttaaatcctcctaaataatacaaaaatatttgtttaaataacacaatcttttaccttgtctaacacattaacttgaattatacttaaaaagtcagttatttatattttatttttatttgaaaggcagattaatatgaaaaagcccattggttttactttgaatttccaggcgcagaaatgtgacgatattgttgaatatattcacattcagaatgataacgctgatgatatatcaaatatacatattgaaaacggatgctgtacagacatttatatggaagacttgtatttcaaaaatacaatatttgagaactgtacgtttataaattgtaatcttaaagactgcagctttaataatgttaaattttataaatgcctgtttaaaaattcaaatttatcaaacggatggtataaacaatgctcttttgaaaactcacaatatataagcaccgattttaaaaacagtaattttaataacgcctgtctttatcaaacaacaaccaaatattctaactttaaccgttccgtctttaacaacatcataataaacgactgcgatatgtcagacacttttttctcagattgttcatttaagaatacggagataaaagagtctaaatttgtgcgcactgaattctttcaaaccagtcttgcggggctggacttttcaaattcaatacttgaaagtatcattatgtcagacaatgcaaaggaattatccggagctaaagttaacagttatcaagcagcagagctgtcaaaactgcttggattgattgttgttgactgatacattaataatattatttatatatattattttaaaacattttcccattccttttctttaaagcctattaaaaccttatcatcttttataacaagagggcgttttacaagcataccgtctgttgacaaaagttttaactgttcttcttcagacatatcatttaacttatcttttaatcccatagaacggtacagcattccgctggtgttgaaaaacttttttagctccaatccgctcatatcataccattcttttaattcatcaaaacttggattattttcttttatatcccgaacagtaaaattaactccattttcattaagccatttctctgcctttttacatgttgaacattttggatagcaaataaattttatcataactctgttatacctttctttagtttctatatttttataaaatacttttttatctaataaaccttcaatctctcacatataaaactaataaataatattttaccatacatattaaaaaatgcaagataaatattagaatatatcgcactataccaacataaaattacttcaggaggtgcgacaaaatgaggatatggttcgtcggtaaaaaaactggtatcgccttgggcgctatcgtaattctattttttgcattaattttatttggacatatcaataaaaattctgcagccataagcgctgcaagccctagcgaccgagacttaccaatatactgcgttgaaaaagatgaaaatgacaaaaaaattgccatttcatttgatgctgcctgggataactctgatacggaaacacttaagaacattcttggagaaagaaatgttaaaactactttttttgttgttggcgattgggtggataaatatcctgattctgtaaaatccttatcagacgcaggacacgaggttatgaatcattcatcaaaacatccgcatatgactcaaatatcaaccgacaaaatgaaagctgaacttgacgactgtgcaaacaaaatcgaggcaataacaggcagaagaccaaatctcttcagaccgccatacggagactacaataatgaagttgttaaaacagctagagagtgcggctattacacaatccaatggagtattgacagccttgactggaaagatttaagcgctgatgaaatatataaaagagtagttcctaaagttaaaccgggcgctattgtattattccataatgcggctaagcacacgccggaagcactgcctaaaattttagatgacttaatagcacaaggttatgaaatagttcctatatcggaattaataataaaagataattatcaaattgatgcaaacggaatgcagtacagcacaaataatgaaaaatcggaggtcaacaacaatgtctgaaagcacattcaccgaaagcagctactatgacaataatattgtcacactggtgggaaaaataatttcaccgcctgaactgtcacatgaaatctacggagaaaaatactattctactcagctggccgtcagcaggctcagtgaaaaaatggactatatacccataactatatcagaacgcctattcggtgaatattatcctacacctaacgaccatgttaagattataggtcaataccgttcttataataattattccggcgtcggaaacaggcttatattaacagtttttgttaaagaaatactttatatttcagaagctgacgaagaagattttgaaaagtcaaaatctatgtccaacgtaaacccaaatcaaatatacttaaacgggtttatttgcaaagagccaacctatagaacaaccccatttaaccgcgaaatatctgacgtattgctcgccgtaaaccgttcatacaaaaaatctgattacataccgtgcatcgcatggggcagaaacgcaaaatatgtacagtcgctgtctgtgggtacaaatataaaagtttggggaagaatacagagccgggaatatcaaaaacatataagcgaaaccgaagtagtcaataaaaccgcatacgaagtttcaatctcaaaattagaaatagtagaatagaaaaagggtggctaaacagccaccctttgttgtcattttcatcacactcatcatatccactgacaaagctcaaaactctgcgtcctatatgctttagatttaacttccattgctgcccctgcagcaatcaacatctttcaaatatctaaatacatcgacgaaaacttcaaataatacttttcaaacaataattgccagcaatctgtgagttaattgacgcagccaagacatattaagcaatccgacttgtcaaaccatttgtttatttcaaactttttcggagccctcgcacttgctcaagcgaccaatagttaaataaacatatttacgagtccaaatactcatcctctacaagcgtgcttaactgttatgcttgctcgtattcatctattgagataaatacgagtgcgtcaatctgtgaatcaactgactcttcttgagtcatccacacatcgcatcacctccgtaacagccacttttataaatagccgtgctttgtgtttttaactccccatacgatttatcacagctttgttccgctataaagtttaattaataacgaaaagtttataaactaacataataataaatctttaacctttttatcaacttattaaaatctttcagcattacatttaaattcaagtatcaaaacaatttttataaaactattaaacacacatcatcaaaacttctctgcattgttagttaaaactttcatttttaaacttacatcctcatcataaactcggtaaaacttccagtttaaatgcgagtttgcggaaaccatataagagctataaaaaattcatttgctcttgttcctgataaatctatgagatcgataaataaagaaatataaaaatcattcaatctttttaagattttcctaatcagcattaatattaatttaaatttctaagtcagccatttagtaatacattaaactcaaaatattacaagacgcagccgacaaatagtttctaaaccaaagtccaaatcctcaaccaaaataatatattagatttgaattcaacttttcatttctcttctgaaaagtctgtgtttaaatttcatttcaatacataaacaaatacaaaagaaacaaaataataaacaaatgaaaatcttaaatcagctcattactataaaaatcatctttaaacagtttatcataccagtatcaaaatttgacttagtatgtgtgagcttttagattggtaagctttatatttacttcccttatcttggttttattatacacccgtattcctattttgtcaagatttttaataaaaaatattcaaaaattctaaggccaaaaatctacgttataccaccactttttagctctaaacagacatatgtatatttttataaaaaagaaaataaaattactgcaaaatactatatatatttctaaaaatccaaaaatattactgtattcttgccatataaaaataataatattttaaatcacaaaaataaatattaatatctaattaattgtgcaatataaacaataagtgagtaatataataaaacactatttaatcaaacaaaacaggaatataatcgtttattttcaaactaatttccgttaccatgctgtcaaaagcaataatttttactccggattcagatgctttcttcaaatcctttgaaaaagttaaatctgttcttatattaggtttaaaaaccttaacaccggacatttgtataatgaatacaacataagcgtcatatccgtctcttacagaatcacttaattccataagatgttttcttcctctctcggttggtgcgtccggaaacatcgctgtaccattttcttcaagcgtaaccccttttgtctcaacaaatatttttttgccgtctgcttcaatataaaaatcaaaccttgacgttccatattttgtctccggttttactaacttaatatcattaaataatttgttttcgttaagccattcattaaaaaccttattgggagcttgactgtctatatttatcaaattgtcacccttatatacagaaatcaaatcatacttagtctttcggttaggatttgaagatacctccaaaaaaacagatgcgccgggaacaagcagctcccgacaccttcctgtatttttcacatgacacatctgttcagctccgtcaacatcgacaattgcaataaatctatttggtcttgaaacaaacctgcctgatacaacattattatatatcactatatattcaccttataaattcttatttactcagtaacagtactatcccatatacttaaaattttctctgccgtatttttaaaattatcctcactatttgtctctaatatcgcattaatcaccggagtatattttttagcatacttaaacagatactcataatcaaaaacgccgtctccagccaatcttccttctttttttccgtctattacttcataatctttaaaatgaagaatacctatcctatcaccgtatagactgtatacttcatcaactattttatgctgttcatccctatcattcatatctgaaatatttacaggatcatatataatagtaacattcggagaatctatttcgtcaaggaatctctttgtcattttagggttaaacatactatgttttgttacagtctctaccccgacaatacttcctaagttttcagcacagtcaactatttcgcgcatacttttaaagaatcgctgataattctcttctgtatgagtttcttcaaatgtattataaaaccctgtttctgttccaaccatatcacagcctaaatatttagcaaatttcagatgagctttaaaccactcaacttcttcttttcttttagcttcatccggatgaaccgggtttatgtaacaccccaaaaccgacactctgactccgtgttccgcaagagtgtttttgatatagcacccgagttccggagtaaggatactattctgccaatttatatctttaaaagacttttttaaagccagctgaacgtgagcagcgccggcctcttcaaggatttttgccaggctctcaatatcagttgccttagtatcatgacctctcattccaaaatttaacttattaaacatgttaacacctcaaattcaatattatattttcgccgctattctatgtattttataatactaataactacatataatagatttcggctctcagtattatgaataattatatatcaagattttaattttgtacactgaaattttgttatttataacattttttcagttgtcttacaataaatttcttgtctatttcatatcgttgttataaaatacccattggaaagaattatatattttctcttggaggtttttatattgagtaagcaaagatttttagaaacagctaaaaaaatggcggatactgtcatgaaagataattcacctataataagtaaaaaatggcagtatgactgcggacttaccttgcttggaattggctcggtatatgaagaaacaaacgacagtaaatattttgattatatcaaagagagtatggactattttatcaacgaagacggaactataaatacatataatccaacagtatataacatagaccatataaataacggaaaagactgcttttggctctacaataaaacaggcgaagaaaaatacatcaaggccgttgagttattaaagtcacagctcaaaacccatcctagaacggaatcgggcgcgtatttccacaagttgatttatcctaatcaaatatggcttgacggattatttatgggtgaaccgttctgtgctcaatatgcaaaagagtgcaaccatcctgaaaattttgatgatatagtaaaacagtttgtgattgcggaaaaagctacttacgaaccgcgctgcggcttatatgcacatgcttgcgacgaatcaaaatcagccttttgggcagataaggctaccgggcgttcactcaatgtttggggccgttcatgcggttggttctgtatggctattgttgatgttcttgactttatgcctgaagaccatcccggaagacaaactctaattgatatgtataacaaggttatttcaaatgttgttaaatatcaggacgaaagcggcgtttggtatcaggttcttgacaacagacgcagcgataattataaggaatccacttgcagctgcatgtttgcttattctatgaacaaagctataaaaatgggatatattgatgaagaaacttataaaccttatctcttaaaagctgttgacggaatttttaacgaatttattagaatcgacggcgactatgcttatcttaaaaactgctgtgctgttgctggtttaggaccggatgacaatcacagacgtgacggaagccttgattattatttcagcgagccgattactgaaaacgactgtaaaggtgttggaccattccttctgctcgccacaaattatatttattaattattataaaatagctcaaagacaaatgtctttgtaatggtcatctatattgctgtatatttgtgcaaatccggtgtttttgttgaactaaagcaggagcagttgttcaagactattcctcaaacacatgatttatttgcattgcagtttggttgctgagattttttaacattgatgaccactttttaattaaaattttaatcaacgtaaatattaaaaaaggcatgtattcgcttatgaatacatgccttaaatttttagaaaagtgattttcgagaaaaatttaagcaaaaaagaatggctcactcaatcgaagaagctgccagcgagactgactaatggagttaaaacaagccaaatcccattgagaccaaaaatcagcctcttcacgcattggtggaatgttttaaagcattagttttttgcacaccgccaaatttttcataagcatatctacccatttttccacataactttttgcagagatactatatttgtttgctaaaaacttgtatccaacgctcccatttgaatattcctgaactattttcttttttaattcaaactatattttgctataaaaaaccgacctcctagtcgttagattttcggtctaactttttggggtcggttcaatacaaggtctttttatattattcattgcaagacttagtctttactatatttattacttttaaattaatatctcttttatacgcgaaaatttgatctgccattttcacttaatattatattattcataagaacacatacatctctaatctacagctgttccattggagcgtccgggtcattaatactcatatgttttaccctatctctgacctcagcctttttagcgtcattaaacctatccaatgtacctgccaaataacctgttactcttcttattctttctataccaataacttcaccgttttcatcagtatcaagcgcacttctgccgcacttaggacattcatcgtttataattccggtatatccacacaccggatcacggtcaacagggtgattaatactgccgtatcctataccgcattctttcataaatcggataacattttcaaatgcttctacatttgttgtggggtcgccgtcaagctcaatataagatatatgtcctccatttgttaatggatgatatggagcttccaatcttattttctcatatgcgctgataggataatatacaggaatatggaatgaatttgtataatattctctgtcagttaccccttctataacaccgaatttttctctgtcaatgttgacaaatctgcctgaaaggccttccgccggcgttgctatcaatgaaaagttcattccatacttttctgtggcttcatccattcttttacgcatatgcccaacaatttcaagacctaaattctgagagcgctgagattctccatgatgtttaccggtaagagctttcaaacattctgcaagtccaataaatccggctgtcaaagttccaagtttaagaacttcacccacagtatcatttggaccaagcttttcagaatccagccatatcccctggcccattaaaaacggatagttttttacggtttttgcagcctgaaccttatatctcgctaaaagctggtcgattaccaaatcaatctttctgtcaagctcatcaaaaaaccaatctatactgccgttggcattaatagctatacgcggcaaatttatcgaggtaaaactcaagtttcctctgccatatgttatctctcttgatttgtcatatctattggcaacaactctcgttctgcagcccatatatgttgcttcagtctcaggatgcccctctttataatattgaagattaaaaggagcgtcaaggaaactaaagttagggaataatcgtttggcagatacacgacaggctaatttaaacaggtcgtaattaatatcttctttattaaagtttataccttcttttactttgaaaatatgaatcggaaaaataggcgtttcaccatttccaagacctgcttcctccgccaacagcagatttttcataaccatacggccctcttcggaagtatcggtgccataattaagagaactgaaaggaatctgcgctcccgctctggagtgcattgtattgaggttatggattaaagcttccatagcttgataagttgccctgtcagtctcctttacagaattttctactataaatttaaccgctcttttagcagactcattactcatcttttcttcaagcttcttaagcagaatttctccatactctgcggaaccggctaatgtcggctcaattttctgctcagattttatgtcggaaacgatttgtttagcagtgtcttttgcattttcgtcgccgctaagcattgcaagagcagaagatagatttgaaataaatttcttcttgtaggtttttgcaactcccggagccatacaaaaatcaaagttaggtatactttgtccaccatgctggtcattttggtttgactgtatcgcaatacaagctaaagcggaataacttgcaatatcattcggctcgcgcaaaaaaccgtgaccggttgaaaaaccatttttaaacagtttcagcaaatcaatctgacagcatgttgttgtaagcgttaggaaatccaaatcgtgtatatgaatatcaccgttcctatgagcagcagaatgatgaggatctaatataaacatatcataaaaacgctttgcaccctcgcttccatacctaagcatggttcccatagcagtatcgccgtcaatatttgcattttcacgctttacattgttatcctttgccgatttgaacgtcaaatcctcataaactttcataagctcagtattcatttctctgacgcggcttctttgagcacggtacaaaataaattcctttgcagttctggtatgaccattatcaacaaggactttttcaaccgcgtcctgcagctgttcaacaccgggtctttctacaccaagacaattttcaacataatccacaacctgctcggcaagttcatcggccatactatggtcagtaccaccaagcgcttcggcagctttataaatggcatttgaaatttttacaacatcaaattccgcctcgcggccatcccttttaacaatagttttaatcatttcaatcctccagaaaatataataacaaattaaacataatacaatatatggtatactcgttccaaaaaacggaatatatatagtatatcattctaaataaaagtgtcaatagcaaaataaatattgaaacataaaagtaacaattcaaatttaagtatagaaatattgacctatagtatgaattttttattcatttcaaattataaaaaatacgtgacaataaaaaaactttatgatataatttaatttatgttgcatattgtaaaagaatagttttaaatctataatggagcaaaaatatgattctaaagaatattgagatgcagggctttaaatcctttgccgataaaatctatcttgattttaattcaggtatcacagctatagtcggacctaacggttccggaaaaagtaatatctctgacgctatacgctgggttatgggagagcaaagcattaaatcgctgcgcggaagcaaaatggaagacgttatattttcaggaaccgaaaagcgaaaggctctcggtttcgctgaagtaaccttaacattggataattccagcggaatatttgatattgattttcctgagcttcaggtaacccgccgtatatacaggagcggtgaaagtgaatattacataaataaaacgacatgccgcctaaaggatattcatgaactttttatggataccggtttgggacgtgacggatattctattatcgggcagggtcaaatagataatattttaagcacaaaatcggaggacaggcgccaaatttttgaagaagcctccggtatttcaaaatataaatacagaaaaaatgaagctgaaaagaagctctcccaaaccactgaaaatctaacccgtgttaaagatattttgagcgaacttgaaagtcagcttgaaccgttgaaaaagcaatctgagaaagcaaaaaaatatcttgttcttcacgaagaaatgaaagggcttgaaataaacgtttcagttataaatatagacaaaaaaagagaaatactagaaaaactaaaagaagatatagaaatatatgaaaatcaaataaatgatatacaaactcagataacagaaaatgatgaaaaaatttctttgatgtttaaggaatcggaagaaatagatttaaaatgtgagaactgccgcactgaggacaggagtattacagaacttattcatgagcacacaaataatctgaatttatctgaaagcgatataaaacattccgaagatactataagcagatttatctctgaaatagatgattataccaaacgtatggccgaacttgacagcgaatctaaaagtttaaaagacagtcttctttcactgacatctcaaaacgacgcgtttgaaaaaagttcattagagctgcaggattcagcaaatcgcgcaggagttgatgtgtctgaaaagagtaaagaaatcgaagcgctgcattctgaaatacttaaaaatactgcaagcgttaagaatatagagaattcaattgaaaatcaaaaaatacttattgataactttagctcacgttctgatattataaagcgggaattaagccaaaaagaatcagacattaataatacagccaatcagttaaataaacttgaaaaagatacagctgaaaaagaaaataatatcaatgacttaaaaaacaaaataaatcagcttgaagaaaaatacggttccaaaaatgttgaattgcagaaagaggtatcaacaaaaaacaaaaataatattaaattgggtcaaataacctcaaaacaaaaaatgctcatcgacatggaacgcgatttagaaggatacagccgaggcgttaagaatattataaaatcttaccaacagaagaaattatcagggataacaatacacggtccgctatcacagcttataaaagttgataaaaaatatattaccgcagttgaaacggctcttggaaacactgctcaaaacattgttaccgatacccctgaagatgctaaaactgcaataaaatatttaaagcaaaataatttgggcagagcaacttttcttcctatatccacaataaaagcaaaaaatataaacaactcatcagcccaaagttatgatggatacattggtactgctgactctctttgcagctgctccgatatatataagccaataataagcagcgtactttcttccacagttgtagtcgacacaattgacaacgcagtgaaaatggggaagggctgttcacaccgtttcagaatagtaactctcggcggtgatattatacaggcaggcggtgcaatgacaggcggcagcgtagctaagtcaatcggttcgctctcaagagcaaatgaaattgaaaatttagccgacgaaattttaaaggtagaaaaaataatagaaacaagcagctcaaaaattaaaatgctttctgttgaaacaaatgatttgatggatgatataaaaaacaacaatgaaaagttaatggcatataatgaaacactgataaaacttgtatcagataaacatcatttaaatgatgtattaaatactatgagcagtgataaaagtaaactttcagaagaattaagtgatttgaccaataaaattaataacatatcaaacgaaatatctgaaaataaaactaaaattctttctattaataaaattgttgatgaattaaaaataaaggctgataaagaggaaaaaacgtttgcagaattgtcgggcaaaaacgaaaagcttactcatacaatgcttgacctcagtattaagaaaaatacaattttaaaagacattgaacaaacaaatgaaaagatccagagagttatctcggagaaggaacaaatattgtcatcaatttcaaacagacaatctgaaattgagaagctaaaaaatacaattgaggatttgcgtaaaaataaacttgattttgaaaaaaatattgagaaaaataaaaaacttttgcttgataccagaacatcactggaatcttatattaaaaagagacaggaaatcgacgacaaaataaaaagccggcaggcttctgtcaacaacataagagaaaccttgtttaatctatccgggcgtcttgcaaaagcacaaacgaaatacgaaaactctgaaactgagcttgaatcaataattaatcatttatgggaagaatatgagttaacctacagcgacgcgtcaaacagagatttgaccgggttcgatttaaacagctcaataaaaaggataacagaacttaaaaaggaaataaaatctctcgggaatataaatattgattctatagaagagtataagactgttagcgaaagggtagattttctgactgaacagacaaacgatttagaaaaatctaaaaaagaattggttcgtataatagacgaaatgcttttaattatgaaagaaagattttcagaacaatttaaaattattaacgaaaacttcagccgggtattctctgagctgtttggcggaggacaagctaatctaagtctgtcagacccggataacgttttagaaagcggaattgaaattgaggctcagccccccgggaaaaaacttcaaaacctaacgctgctgtcaggaggagaaagagcattcactgcaatagctcttctgttttctattttaaacgtacgtcctactccattttgtatattagatgaaatagaagcggcgctggatgatgtaaacgtttaccgatttgccgaatacctaaaacaatacagccaaaacactcaatttattgtagttacacacagaagaggcacaatggaatccgccaatattttatacggcgtaaccatgcaggaaaaaggcgtttcaaaattattaacattaaatattgacgaggtgagtaaataatgggattatttgataaattaaagaaaagtcttgcaaaaacaaaagaaagtataaatgaaaaatttaatacagtcttaaaaacatttaagaagattgacgacgacttatttgacgagcttgaagaggttcttattacatccgatttgggcgtaaacacatcgatggatataattgaaaaactgcgccaagctgcaaaagagaaaaaacttagagacagttatgaattaaaaagtgaactaaataaaataatgagtgatattttaacagaaggcagcggttcaaaaattgaacttcaaggcacgccggctgttataatggtgattggcgttaacggagttggcaaaacaacatccataggcaaaattgcaaatatgtatagaaatcaagggaaatcagttttgatagccgccgcagacactttccgcgccgcagcaatagaacagcttgaagtttggtcagaacgcgccggggttgatataattaaacagcaggaaggttcagacccagctgctgttatatatgacgctgtaaacgcagctaaatcaagaaatattgatattcttttatgtgataccgcaggacggctgcacaataagaaaaacctgatggaagaattgaaaaagatttataagattcttaaccgtgaactgccaaactccagcaaagaagttcttcttgtgctcgatgcaacaacaggtcagaatgcggttcagcaagccatacagtttaaagaggccgcagatataacaggaattattttaacaaaactggacggaacggcaaagggcggtattgtattggcaatcaagaatgattatgacatacccgttaagtttattggcgttggagaaaaaattgacgatatagaaccttttgaccctgttgaatttgtaaacgcaattatagaccctgaaaatgaagaaccggttgaggaaatagttaaataggttttatttaaacataatttactatcattactaactattaaaataaattataagatttttttggcgaattttctcaaaaaatataaatgtttaaaaattacttgcaaatatgatatttttatgctattcttataaagttaataataggtagtcctctgcctgatgtgtggcaagaatatcttaaaaggaaaggatgtaaaaatggatattttacaacaaattacacaagaacaaatcagaaaagatttacctgaaattgctattggtgacactttgagagtgtatgtcaaggtaaaagaaggaagcagagaaagagttcagatgtttgagggaaccgttatcaagaagaatcatggcggtattcaggaaacatttactgtaagacgtctttcttatggagttggcgtggaaagaactttccctgttaattctcctaaaatcgaccgcattgaggttgttagacatggtaaggtaagacgtgctaagctttattatctacgtgatagagttggtaaagcagcaaaggttaaagagaaactttaatagttaaaaaatgcagtggtggttaatctttaatcaccactctttagcattttgtagttattttaggagtgtttattatgaataataaaaatcaaaagccgaacaatcagaacaatggaaatattgatgaaactgttgaaaaagctaaatctgaaataaatgctcaaactgactctatgcttcgtgaaatcgaagaaagacgccagcggcgtttagcaagacaaagagaaatggaacagcaaatacaagctgaagaagaggctaaggcaagacggttagcaagactaaaagcccaggaagctgccaacgctgatttaaaaatggcttcatcacgcagaaatactgccgatgttcaaaaacctgtaccgactgtatcttcatcagacagtgttttcagcaacgcccacagacagcagcctgacgcgatagagaatttttcatcagctccgtctgcttctaaaaatacacagtctcgtccccagcgcaatgaaagcgttttaaacgcctcttcctcttctgcaaatacacgcagacgaacaataatgtcttcaggagaaacgcaggttatgcctaaaatttctgaagctgtacctccgtctcagaagagacaaaatactgctccatcaagtcaaaaaagagcttcagagcagaattcttctaaaccaagtgattccgcacatgtatccagagcttctaagagtaatgagcaagcatttaaaagaagacaagttcagaataccgtgtctgcaaactcacaggcggccggacgcgcacctgtaaaaagaggaaatatctcagcggcaaaaccaaaaaattcacataaggaagtaaacatgatgaaagaaatcagagattgggttattgcgatagttattgctgttgccgttgccctgcttataagaaattttgtattcactttggttaaagttcaaggtgagtctatgcagccaacactgcaggaaaacgatagattatatgttaacagattattctatacaccaaaaaagggcgacgttgttatctttaaaccatcatctgaccctaaaaggccatatgttaaaagagttattgcaaccgagggcgacactgtttatattgattttgaaacaggcgatgtatatgttaatgaccaggttattgacgagccttatatcaaagctaaaacaacacgctccggcagttatatagctgaacaaattgcatcaggaaattatagcaaagataatccaattgttatagaaaagggtaaaatctttgttatgggggataataggaataacagcagagacagccgtgaaattggtcaggttccgaaaagtgaattaataggcggagcagtatttagattttggccattaaataaatttggttctgtctcttataaagctactacctcttatttaatcgaagatgaaaacatgaatttcaaatttgttgcataataagtgtgaatatatcggtattgccgtcggcaataccgtttactttatagagatttaaaaaggagatatatatgaacaataaatatcagcttcaatggttccccggtcatatggcaaaaacccgccgtatgatacaagataaccttaaactagtagatgtagtaatcgaactcgtagacgcgcgccttcctctttcttcacgcaatcctgacgttgataaaattattggttcaaaaccgcgtattgttgttttaaataaagccgatatagccgataactcattgactatgaaatggttgaattattttaaagataaaaatatagaagcgatttcagcaaacagccaaaccggcaaaggattgaaaaaagagcttgataacgctatagaaattgttctggctgacaaatttaaaagagatgagacaaaaggtatacaaaggcacgctgttaaaatgatggtaataggcattccaaatgtcggaaaatcttcatttataaaccgcctgtcagggcgtgcagcggcaaagaccggtgacagacccggaataacacagaccaaacagtggataagaatagcaggaaaatatgaactcttagatacacccggaatcctttggccaaaatttgagaatgaggacgacgctaaaaaaattgcctttacaggcggaattaaagatgaaattttggatattgaggatttagcatatgaacttttaggatatttaaagcaatcttatatggacagccttttaaaaacatataacttaaatgattcagacagcgaacttaataagtatgaactcttagaaagtatcggccgcaagaggggctgtgttatatccggcggagaagtggatacatttagaacagcaaacattattatatctgattttcgctctgccaaactaggcaggataactcttgaagaacccaaaagaaatgaggaaaactgatatggaaattgatttattgcaatatgaaaaagatttaatatcccgcggatacgaatatatatgcggaatagatgaagccggcagaggtcctcttgcaggaccggtatgcgccgccgcagtaatactgcccaacggacttgttattgacggcgttaatgattcaaaaaaattatctgagaaaaaacgtgaaaagttatataatgaaataatagaatcagctttagcatattctgttcaatttgtctttcaagatgtcattgatgaaataaatatccgtcaagctacccatgctgcaatgcaaaatgcagttaatggtttaaaaatacatcccgatattttaatcgttgacggaaatgataatattgattttgataacattgaaactctatatattaaaaaaggcgattccttatcccaaagtattgccgccgcgtctattctggcaaaagtcacaagggacagatatatcgttgagctatcaaaggattatcctgaatacggtcttgaaaagcataaaggttatgctactaaagctcatatggaggcaataagaaaatacggcgttcagcctatacatagaaagacttttatgactgataaagttcttggaataaataaaacaaattaaaacggtgatacttttatgtataatactaaagaaaccggtaattatggagaaatacaggcatctaattacctagttaaaaaaggatatacaatcattgccaaaaactactatggcaagcatggagagatagacatcatagctgtgacaccggataacactactttggtgtttgttgaagtcaaaacaagaaaatcaaagttatttggttatgctgccgaagctatagataaaaagaaaattcaaagtattataaaaactgcagaaaattttatgtttgaaaacccatctgaacgccaaattagatttgatgttattgaagtttattataaaataagaaataacgatgaactcatattggatgaaattaatcatattgaaaacgcattttatgatataagcaattatatatagcgatattaatttttaattcaataccaattaagtatacttatatgaactgacttgcaataatgctctatttgtctgcaaatattattatactgtttgtacataatcaattaacgtcactataatatatttatatataacatatctgcctgatcatattaatttttttatacagcataaatcatataaaataaaaatttattataatgataaaacacaacgattatacattgcgtgatacagaatttatattatataaaaatacattaaaactataacattagataactggttcaaattttgctaagtttaatgaaattagaaaagcactttatacaaaagtatattttgcggttcctctctccttggaagagaggttgaaataaaaatataaatgggattttactattattttttaaaacagattttattttagaattctaaaagatagagagtcaaacaaaatcgttaaactatttacatacacacctatgtttaaacctgattttacctgatgagatttttgctgcacttgtcaatctaccggaatccgcaaatttatattaaattattaaaacaaacgattattttacagactttataaaattaatatttaatttttatatatgaatatctatgatagtgacttaaaaatttgtcaaattcaatattgcaatttgttctgtcttatattacaatattatacaatagttctaatccataaatatcttattgtagattatatagctgaaatttattatttatttttcaaacaaattaaattattgtttatacaaataatttataagattttggaaatttatctatattatttaagataataaaaattttagtcaaatagaaattttaaataaatctgaaaggaacaatactatgaataaagatgtatatgaaagcccgctaaactcccgttatgcgagtaaagaaatgaaatatattttctctcccgataaaaaatttaaaacttggagaaaattatgggtcgcactggctgaatccgaaatggagcttggtcttaatgtaacaaaggaacaagttgaagaattacgtgcaaacgtggacaacataaactatgacgttgccgaagcccgtgaaaaagaggtacgtcacgacgttatgtctcatgtatacgcatatgggcagcaatgtccgaatgctaaaggaattattcatctcggcgccacttcatgttatgttggcgataacactgacctaataattatgaatgaagctttggaacttataaaaacaaagcttctcaaagtaattgctttattaagagattttgctcttaaatacaaagacttgccgacattaggatttacccattttcaggcagctcagctgactactgtcggaaaaagagcaacgctttggatatgggaactgttgatggatcttgaaaatatagacttccagctaagccgcgcggctctgcttgggtgcaaaggcacaacaggaacgcaggcaagctttatggaactttttgataatgatattgaaaaagttaaagctcttgataaaaaaatctgtgaaaagatgggatattcaaaattttatcctgtttccggacaaacatattcaagaaaaattgattatcaaatgctgtcagtattgagtgatgttgctcaaagtgcgtataagtttgcaaatgacatacgcctgcttcagcatcttaaagaaatagaagaaccgtttgaaaaatctcagattggttcctctgctatggcttacaagcgtaatcctatgagaagcgaacgcatttgttctttagccagatatgttattgtcgacgcagtaaatccagccataacctcttctactcaatggtttgaaagaacacttgacgactcggcaaacaaaagaatcagcgtagctgaagcatttttaaccgttgacgctatactgaatatttatatgaatgttgcttccggattggttgtatacccgaaagttattaataaacgtattatgtctgagcttccatttatggccaccgaaaatatcatgatggacgctgttaaaaacggcggcgaccgccaggaacttcacgagcgtatacgcaagcattctatggacgccggaaaagtagttaaagagcaaggcggagagaatgacttaattgaaagaatagttgctgatgattcgtttaatttgagtcacgaagaaatagacaaaatattaaaacctgaaaactttataggaagaagcgtaagtcaagttgaagaattcatagacgaatacgtaaatcctgttttagataataatgatttagctgaagaagtggaacttactgtttaattaaccaaaagattggagcgcagaattatgactataggatttattggcggaggaaatatggccactgcattgatttccggacttatttcatcccaaaaatttaaaccggcggaaataactgtttatgatattgacgcagtaaaattaaaagaactttcaaacaaattaggaattgttccgtcaaattcaataactgagcttgaggagcgggttgatataatcgttttatctgtcaagccaaatataatgccgcaaattttaaataacttaaacggctataatgaaaaaatttatatttctatcgccgccggaataacacttgacgccctggcaaacggtcttggctcagataaaaagattataagaaccatgccaaatactcctgctctcgttaaatgcggtatgaccgttataaccccgaaccaaaatgtcgatgaaggcgaaatcaggttagtcgaggatttattgtccggagttggagaaaccgtaagacttgaagaaaaatatatgaacgcagctatcgcgctgcatagcagcagccctgcatatatatatatgcttatagacgcaatggcagacagcggtgttaagtatggaatccccaaagcgctatcacaaaaattagccgctaaggctgtcgaaggaagtgctaaaatggtattggaaagcagcgaacatccgatgaggttaaaagataatgtttgttcccccggaggaacaactattgcagccgtatgtgatttagaaaaaaccggattcagaagttcaatccagagtgctattgattcatgcgtgaataaagcggaagaaatgtctaaatagataaaaaattaacgcctgataatcaatatcaggcgttaattttattttatagcggctgttatttcatcttccttcatatcaattagaacagttttgccatgtattagttcaccttttataagcatctgcgctaacttatcttcgatattcttttcaataaatctccgcattggtcttgcgccatattgtctgttataggatttatccaaaataaattcttttgctttctttgaaacttcaagagttatatccttttctttcaatccgtcagacaaatcatgcagcatcaaatctattattttaattaactcttctttttcaagttccttaaatataataatctcatcaacgcgattaagaaattcaggtctgaataactctttaagcgctctgtcaattttaatatgagtggcttcttcatcttcattaaaacctacaacgtttgattttttatcacttccggcatttgaagtcataattataatagtattttcaaatgacactactttaccgtggctatcagttattcttccgtcatctaaaatttgaagcagcatattaaatacatcagcatgtgctttctcaatctcatcaagaagaattacgctgtatggttttcttcttattttttcagtcagctgaccggcttcatcatatccaacataacccggaggcgaaccaatcagttttgaaaccgaatgtttttccatatattcagacatatcaagcctaatcaatgcgtcttcaccgtcaaaaacttctctggcaatttgctttgcaagttccgttttaccaactcctgttggacccacaaaaataaatgacaccggtcttctttttaagctaatacctgctctttttctccttatagcactcgctacgccatttacagcctcattttgaccgattactcccttatgaagtctgtcttctaaccctactaaacgttcagactcgtattcactaatatgtttaacaggtattttagtccaattttcaattactgaagctacatcctctgcttccaaatattttatcgacgctttctcaacttcagaaatttttgattgcagctgtatttcctgaacttttaaatcagctgcttttttatagtcatcttccgcagcggctttatctttcgcatcctgggtttctttaagttcttgctgtagtttaaccagttcaatcaattcgttattatttaaattaactttcgaagcagcttcatcaataacatctatcgctttgtcaggcaaaaatctatcctgaatatatctttcagcaagaactgttgctgttcttataatatcatcagtaatttttacattatgataatcttcataatagcctttgataccttttaaaatctctattgtttcctcaaccgttggctcttcaaccataaccatctgaaaacggcgctccaaagcagaatccttctcaatatattttctgtattcatcaatggtagtcgccccaataacctgaatctcacccttagaaagagccggtttcaaaatattgccggcattcatccctccctcagcatctccggctgaagcaatggtgtgaatttcatcaataacaagaatgatattgcccgcttttttaacctcttctattatattacgaagtctggattcaaactgtcctctaaactgagttccagctataaccgacgtcatatctaaaagataaatctcataattaagcaatttctgaggtacttccccctcaacaattttaagagctaaaccttcagcaattgcagttttaccaacaccgggctcaccaatcaaacaagggttattctttgtgcgcctattaagtatctgtattgtcctctctatttcacgctctctgccaattacagcgtcaatttcaccttttttcgctttttcagtcaaattaaccccataagtatcaagcattttcttttttgaattctttttttctttagttcttctaggtccagcttttcctggttcaccgctctgactctcactgtttgaattcataaatctgctcataaactcaaacggattacgctgaatactgcggctcattttttcctcgctgtcaggagtattattttcttccttagtgttatcggaatcatcagaaacttcctgatcatcttcctgagcttcctctctatcatctgcttcagttagtgaaattatatctgcgtcgccaccaagttcttgtctaagcaaatctatactctcgccaaggtcaaaatcatcacccatttcatcaaacatactcttcatttctgtatttaagcggtccatttcttcagggtcaacccccattttgtctaagatggactcaacagggcctaaattcaattccttagcgcaagatagacaataaccttcattattctgcgtaccgtccggattcaattttgaaatatatacaactgctaagttttttttacatctgcaacatagcatattatcccctcctagttcggaacatgtcttaatattataccacataaatattaatttagcaacactttgacacaaaaatgaaccaacaaattgaaagaccgtccgatatcggacggtctctcattgggaagaaatctataaattaattttactacctaaataaattttgaatacagattattcaaattctgtatattcaactgttatatccttaattatgaacttatttggatcagctgaaccaggataaacagcaaggcaaagattatctctgtctatattagaggcttccgggaatccagtaaacatattatactcattccagctatccgctccagcaaccttagccttagcagtcaaaactcctgttttgaagttagcagttatactaacaatttgatctgcataatttgtagccgggaattttcctcccgcacagttaagccactgatgttcagtatttgaagaaccgcttcgtcttccaaccccaacgtcaagcatattcatttgatcccaacgtccataacttgttctagcgatacgtattttattttcatcgctattatatgttccaggaattccgcttaagagatctaccgtagcacaatcatcagatgtactatagcccttttccattgttactgtaaatgttacagtaactgcgtctgtagattttattccatcagataatgatgataaattccaatatgcaccgtctgaggtttttgagctgctagaaactgtatattcaccattgttatttgcaactgttgcaccgcttcccaaattcgttgggataccggttaccgagtaagtcttattaacaagtttagcaactgatgcatccgatgttacagattcacctttagctccagtaatagtagtttttccattttcaggattaagaatcttatatccgtctgttaaagtatcaaaaactacatcgtactcacctaccggaataccctcggcagtatatacagcgctggtggttcccttagcaatctgtgcagatgtttgcttgattacagcatttcctttatagaaattaaccgtgaagtcaacatcaacatcaggagctgcaccgtttagtgaaatagttcctgtagctgtaaacacattttcagtatccgttgtcggattaattgttacaggaataaccgcctttgtacctatagctttatctgatgattccctaatatagagtacaagtgttgtttcgattggcgtctcgccattagccggtcttattacagttacctttgtaccatcattgtttactatggcatattctgatgctgattcccacttaaattcgtaaccgtcaggagcctgaggcagatcaacttctgtacttgttccttccggaataacaaatgttgtctcacttgcaactttattaactccggcatatttttctgtcatgttcatgggatcccaattatctgtccacttatatctagctttaaaataatttataggattaaactctaaaatctgccaatcatcaagaacagaaccaaaaccattagtgcattttactctcttagaaaaatctactgcttctccactcttatttgtggttccgtattcatagaaacgagcgtcttccttcatattgcctgacatatctctccagccttctgctgttattcctgccgggcttgctcctgtagttgcattgtcgtctataactgtattatagaatgtaatctgcgcgtcctgtctccatggtcttccatacattgaatttgttatattatttcgggtattatagagttcgcagttatagaacagatatccataatcattattaccatcagtatttgccgcagttattgttgcgccgtaatccttatcagtcattccagctgctccaagcttacagttatcaaacactgccgttgcattaccatagatatagtctgttccgcctattaaatcacaatttttaaaatatattcttccttcactaatatatactgaatcctgattacctcttgcgcgaatgttttcaagtatacatctatcgccatttattgaaactgcatgacctctttcattgaatcctgatgaacgagctaaatatgcgctttcttcaggggtaaatgtatagtttccatcttttgttttttctatatattttgctttacttacggttttatcagaattcaacactgattcaggtgcaacttcggctgtgtcttcataacaaatgctcaaactatcacgctccggaagcatatcttttaactcattatccgttttgccgggaataagttttctatctgcctgaggctttactcctgcttccttttcaccttttgttaccataacaggtatactatttattatattaaaatctttaactgttatgtcgcttgcagactttcttactacaagcggagccatatcactaaagtttcctaaatgagaaactctaactgatacatccttatgagcaactccgtctaaatcataatatgaaatagttgaaacaccatttaacacctgacctacttcatatttggtaaacttttcatcagtatctttataaccgttccaggtttcttcttttgaccagttaattttaggatcatagtttccgtttaaatctgctgtgcctgcgcaataacctgtacaataataccatgaaagatttactttaccattagtaccgggagtctgctgaagagttacatactttacattatcaaataatacctgctcttcatagaatcctggatctacattaattacaacacgttcagcctcagactgtggatttaattcagtcgctttagctacagcgtctcttattgtagaaaactcaaagttagctccgctgctttcctgcgtcagcgttgctttattaacggtcggttcacttgttggaccgggtgttgctgacggtgattcagtaggtcttaaaacgtcttcaacctcaaaagtttttgacaaaggatttaaggtatcaacaccgttccaaatataaagtttaacaattcctttatcaggcttgctgtaatcaagtccttcaaccgttgttccctttatgtcatagctctttgcatccagcattatctcgctgtctgcttcgtcatatgctgctgcaagaagttttcctgttgggttttcttctgttccgttgtactttaactcaacgttcagctttccatcatcaccataatatgcttctgttatttcataagcatatcctaacggctcggtcgttggtacaacttcaggtgttggtacaacatcgggtgttgctgacggttcagtttctcctccgcttgtaaaacttacatctatcgttacattttcctccggcatcacaaaagttccttgatttgctccggccatcgttacatctaccgcgcttcctgatgctcctattacgctcattccctttgttgtcattcctgcttccggaactgcgtctatctgcacggtctctcccggtcttgcttttacagataccactggtgctcccgacatatacgatattccgacaaatcttcccttagatcccagtactcccatataataggtctttcctgcttctactggtatgcttgcgcatacattctcttttgccgttgctatatggtaatacgcagagtctgtcttcgttgctgttccttcttctgtaattgctacttccttaccgcttcctacatctactacgtataacgaaagcactcctgaagccggtgctacgaatttcattgccgcaccagttatcattccgttttcaaattttccgtttgtttcaccatgtgaaacatattttgtaaacgactctccttctattgtcgcttttgtgctccctgttacatccaatgtcatcatcggcgtcaaacttccgcccatagctgccagctcaggcataagttcctgaccttcttttacagctccgtttgctctccaccatacttctcctgcactgctcaactctgctgattccagttctgctgtttcagctgaaatttctcctaagtttgtcagagctactgttccgccttgaattccggctgctgtttctgccgtatacttctttgcaggtattactacatttgtgcattctgcggttctttcaacactcagctttgttgaatcagcgtcacttgttaccacatacatgttaactgattcgccgaactcaagcttcatatcaagtccgcttacttttccgctgccgcttacatcatacttctttgtctctgttaccgttccctctgatgattttctctcaaccaccagtttgtttgacggtgttccttctccattatacttcagctctacactcagcattccgtcatagtctatatccactgcgctgaactcataatccattgctgtatagtttactgccttatacactaccggatttttgtccgttccgccatagttggtcggtactgtcggctcctgattttctgtctttatgttctgctgtaatccgaacaggaaaaacagttcttttgcagccttagctctcgtcacttctgcctttggctccaactctgttccgttcatcatctttgttctgctaagtcctttttcacttctcattaagcccaaattatatacttcatagaacttttctaagtactctcttgatatatctttagtatctgtaagatttccccagcctaccaacggataatactgtgcgctctctcctgttaaattcggatcatactccggatcatcaggagatacactcgaaccattgtaatccgtcatatacttcggcttgttccattctcctgtttcagcgtttctgccgaattttaatgaatatgcgtcatatactattcccgccattgtttcacggttcagcgttccgctgttcatatactttgcaaaatctgctgtttctaaattccaaattgtgcatattcctgctataaagtcatttgtgcttattgacttctcaggattaaacagattattattatctgtatccatagctcctatttgaagcattttttctatttgatttctatactttgaatttgaagctgaatatccgtttacttttgcttcagttacatcctttgctctgttttcgggatatacttcgttccaatttccgcttgtgcatgctgcctttactttgtcgttcaggtatcctgctaattcttttatctttgcactgccagccgcgctctgagcataaatatcctctgcaatcagtttgctgaacatctttcctgccgcttctttatagtgcgttccatctattttgttatcaggatgtccgtttgcatatgagccgctgtttgtttttcccggtgactctccggcttcaagactttggtatatatccattgtctctgctgagcctatcttttcaaaatatgcctttgcctttgcaaacaaatctacaaactctactttattatcagcctttgccttatcttccataaactgcggtgagtttggattaaagccccttggtttctcactgcttaccgatgcaacaccattacttgttctcggcattcctgacaccaatatcggagttactcctctctcttccattgcagcacaatacatatccagccattttggatacgtcactttacttgaacctcttccaaatctcatagctgaatcatcagtttcatcattatgtgcagaatgaatcagtacaaaatctccttcttttgcattatacagaacattgttaaatcttccttctgtatagttcgctctcattgaacgtccacccattgaataatttacaacgtttaccttgtccaaatcaaacattttaaaaatattctgcccccatgaactcatgctgtcttcctcaaatgtataagtcttctgtgttgagtctcccagcacaaacactgtcggctttcctgacgcagtattattttctattctgctcagcgaaattgattctattcctatagtagttcctgctgccgttggctgtttgtttggctcaatttctatctctatgtacggccagcctgtcacatagtcatacttccacgttgaaccttcccatgacgcataattattatgtgccacaagtccagcagtatcccaagcacttgaactcgttattctgcttgcctgcattcctgtcggagctatccatgtattacttgatgttgtttcacttgtacagttaactgttattccataacctccaagtttatctacatcaacacggaatattaatccaccgaaattatcattatttccatccttgctttttaccgttgttgcgtctgtctcagttatgctgcagccgttttcatcctgctttattttactgggatctacggttcttgcaggcatcgcactgtttattttcacaaatccatatccctttgacgcgtcatacatgtctgtatttttaacatttatggctccgtctacttctgccgatttaaagttaaatgtcttgtatacttctcccatcagttcagatgttccctcttgtccggcaccttgctcagccgctgtcgccaatgtcatacccgacaacatcgtgagcagcatcattatcgccactgccaaacttatacatctttttctcatcctttttcctccttaaacttttagttattttttaatgtatttttaatcttttctctttaattatatataaaataaccaaaagaaacaatagccagaaaaaaatattttaaataccaaaagacaaaaagtattgaattactactgatattatgttataatgttgcaataattaggaggagtttattatgtctatatatagttttataaaaaagaataatggtatacccctttatgtgcaagttaaacaagcctttataaatgacataaataccggaaagctcgaaaatatgcaaaaacttccatcaagaagaaaccttgcaaaagatttaaatttaagtaccacaacaattaataacgcataccaggcattagtagatgaaggttatgtaataacaattgaccgaagcggtttttatgtaaagtctaatgatatacaatacggtgaatatgatgatgttccatgggaaagcaacacagactatacttataattttagttataataattgtgaaatatccaacttagatgacacatattcaaaaatgctcacaaaatatattcaagcaaatgatttttccagcttttacatgcatggaaataaacgaggggaattagaatttaggtctgcaatttcaagatttttatataataggcggaatatagattgctccgtaagtgatatatttttaggtgcgggtattcaatatcttcttactgttgtagtgatgatacttggaactgataaagtttatggatttgaaaatcctactgattataaaatgtttatatggttaaaaaatcttggtttagatataagactggttgatatagacttagacaacggatttaaatgtgacaaactggatgagctcggtattgacgttatgtttgtcatgccggaaaatcaacttccaaccggacattgcatgtctaaaaagcagcgcagagaacttgcccagtggtgcagcggaaaaaacagcagcaaatacgtaatagaagttgcaactgacggaaatttaaattataccaataatactcctaatccaatttattcaatatataaaggagaaaatgtaatttttattgattcattcgacttaactatttctcccaacgtaaagacttcgtttatggttcttccacacggtttggtcgaatcagtaataaaaaaaattgaaacatattcgcctctcataacaattcttgaacaaaaaatatatcaagacatgattaacagcggccaactggaacgtttaataaaacgcaacaataaaactatgaaagacaaacgcaattatcttatttcttctatacaaaaatctaaacttggcccacgatttaagtttattaattatgatacgggaatgaatttgcttggaatatttgacagccaaatgaatggaacagaattaacaaaacttgcatttaataatggagtaaagatttttgaaatgacaaaatttttattaaaaccaaataatattatgaccaaaaatgcttttgtatttggttacgccggattaactattcctgaaattgaaagcgccgtgcaaaatctcgaaaatgtttggtacaaattaaaataataaaaaatttcaagtccatggtattaattaaagacataagttaaatatgaatataaaagtaatttttaaacacatttatgattttataaacaccaacaaatttatataaaatacatctttatagctaaaataaaaactggaaaactttaagttttccagttttggcggacagggtgggattcgaacccacgtgccggagttaccgacaaactgatttcgagtcagccccgttatgaccacttcgatacctgtccatacgatgtatatttaacttactgcataaacaaaataattttagcttatgtccattagaacatatttattattatctcagtcatgcacaacaaaaaatattatagcatatttaatttatatttgcaatagtttttaattattttttattttctaagcagaacttataatgatatcacttacatattaataaaatatttatcacgtacatttattttaccaactataaaaaatataactatttttattaattggcgtcatataatctttttttatatctcattttataaacgtttaaatatattgtcaaaatcaaaaaataaataatattgaccgctttaaactttgatttaaatatttaattaaacagaacaataaaagcggcgtgcagtaagaaagaatcctcaaaagaaaaaatataactaaagttttagtcaaaaaattatttataaataattgtatcgcaaaaaccacaaaaccaggacaaggtatataaacagttcggatataataaaaatcacataacacgatttacaaatgttattaattctcgacaggttattttattgacaatcaaaaaattataatataacaatatcaaaaaattcttcacggtattaaaaacaaattttattataaaattaacaccatagaaattattgatgagtataactattttatatccaaaaacatacagttaaaataaaactgacaccgatgtaataccgatgtcagtatattattaaaaattatggtttaccattgtcacttttttacactgcgcatacatttttgacaactttataattcatattatacttcttgtaacacaaattatattatcgtcttacttattagcacctgcaaacggcaataagtcctcaatagtcataacgtgtattgaacgcttgcctgtcagcggatgacctatcgtttcaatctcgtcacaccaccattgtgatatcatctgcgcaccgtaatattgaatatgtgtgttatctgaacctccggatttatactgtgaatttgcaaaatcaccaatctgatcaattgtactctttcccagtgaattcttaaatgattccggaagtgaagctccttttacaaatctagaatcattattatttataaatgcaaatatatcttttgatttctcagttccaacatcatttatatatttatttgttttggcatataaatcaaagtatggcaatcccagttcctgagctaaatcttttgcagcatttacatatgcctcatgccctgcatcacttagtttatttcggcttattgatgtggttataagcggataggcgcctttttcaagtgcaggctttacataatattcatatagagaatttttgtatgagccatcggtaaatctatctcctttataatcggtatgtctatctgcctcagacttttcatcattatgaccaaactgaattatgaaataatcacccggcttcataccattaattattgttttataattagcttcacttctgaaacttaaagaacttctgccgctgagcgctaaattgtttactgaaactccatctgtgaaaaagttacctaaaacctgagcccatccggttcttggaaaatcatttttttcgccggatgttttataattacatgctgtagaatcaccggcaacaaatatagtagcattattagcaactgtctgaccatatgtataaggcgatttcattaaaggttcaacagaatttgtgctttcaaaagcaaacacttttatttccgaattactgtcgaccggcacatcttccggattcagatagagtattgtctcttcgcctgctttctcagtcgtttcctttaagttaaacaacttacatgctgtaagcgctccatcattactcttatcatataccgcaacaaccagtgtttcttcaccggttctgtctgcttcagaaatactgtcagtatatacaatatgacttacatatccaccgtccataggagacataacaactcggccctcagcatttgaaatggcaaccctgctaatttctacagcagtataacccggtacaaacacttctatttcctttgtatcttttgcctctcctcttgaaattgttgctgtcaatacgactttactgtcagttcctttttgacgatttacgacaccatctgctgaaacgacgttaggattgctgcttatccaagtaattgttgttccgcgtctgcctttagcaggtaattcaatatttgacttaaccatactagtatcgcctatattgagagcttctttcgcaacagctactgcgccctcatcatcagtatcagcaggaacttttaaattaaaatctttagtaatcctcaagtttggataatcctgaaatgtacaaacagctatcattttgacatcatgattatccttatcagtattaacatcaccactaatcgatattacatcgggatttgatgactcccacgctacatctgcgtatccaattgaaaaaccaaaacctgaaatcaaatccaaatcatcagtaatattattttcagttgtattaacgcctttaatcatattaaaagtgattccgtcggtttcattctgaactgacttatttataaaatcaacgcttacatcaacattcttctccggcattacaaaactgcactctgtgtaatcactatttatatttagtgaaatatcagaatcatcaagtgaaatattcccaatccatgcattattgtttggagttgacttaacagttaccatatcacctggttttgcattatatatttgcttctcgctaaaattcataccacatagcgtgccggttgtacctaccgcccacataatatattcatcacctgctgtgagctctatagattgattacacaatccaaaactgccgtcatcactgaacacggttattttaccagtcatcggagtataagttccatcggcatttttcttagaaattttaagatccttaccatcgcctgaattatattcaccatttgcaatctgacgtctgtaagcatatgttagcgtaccgcttttatttgcctttatcactaatgcagtagaaccggctttttcagccaaatcgctgccggccggagcactgtcaagcctaatctgaatataatgtgtataatttactccgtttatattatactttgcagacttcaaagtagtattaaacacggatgacacatttaaattattgtcatcaatatacacagaaccggcctttgtgggtgttgacgaattaacagaccaatcggtaaccgcctcaagatttgcattcgactgaccggttgaaacttctaccgcacctaaatccgaatcataaagaacaccaacctcatattcaccctctgccgcaaatactcctgccattggtaatatacaaaataccataacgcaagcaactgcaaaacttacagtcctttttaataaattttccatagtcaactctccttattaattaattttcattattaccacatatatgcttttattataatactaatttgtatattttgcaataataaaattataattttttacatctcaagcatataaaataatatattgttataaattcaggatataattctatcaaaagtttataaaattcttatccaacttaaatcattacgtttatgttataattttgtgttttgataaatctgctgtttaaaataatgtaggattttaattatattttttgttaaaacaaagtcagaatttaaaccatgaaggttcaattctgactttttataattatctgaagtaattaatttttatattttttaatttataaatttaataatatatttttttcaagacgaataccatacaaattaacttcaaaatcaccatatatttattgtttttgcatttcctgcgtaagtactttacactcatcttttcatttaactcatatttgttttcttttccatcattcataaccgcgcttcttacgccgtctgaactctgaattcaccgtaaactataaaaaatgctgtaatgtttgctcataatttaaagataattctgatatataatcaatacaataatatgttatagtattaatttattcgcagttcaccacacaatgggacttgactttcattccaaagaagcgctttggatttctcgccgcttggaatatcatattccttagtctcacctttatttatgctataatttgtgctgttttttagtgatccgtcaagattgtattccgcaatccataattctgcgtcttcaaacggtctatcgacaatgagtttgccgctgtctaaatacattagttctctcatagatacgctgacattgtcgatatatgttctatatacaccaagacgctgaaagcttatgcttgaaagctttattgttgtatcaaattcaaattcatattcaaatacggctgaggaccaattcataagaataatgccatagttaaaaatttcccaccgcgccgacaataagtctattgagaagagaatctatcactgcaaatctttctttgtcttttaatacttttgcaagtctttttgcctgctttaaagtatatataaaactgcctgcgctccagcctgtttattcagttcatcagtccaatctataaagtgccaccaaaggtcacagcatattttttattcgatttttcacaatccaatacaaaaaattttctcctcatccgatattctgttttatagtctgaattatatcgctgtttactgtaaaagatttattatattcagtaattaataaaatattataactcagttttaactcctaaaaatattatttaaagttacatagccgaattctaataataaacaccaaaaaatataaatccaacgtataatgaattacaaaaaaataagaccgtatgctaaacaccacatacggtcttgcttatatttagaaattaaaaattagcttatacaccagcttttcgctttttcatcgtatccaaataaaccgcaaatacaattactacacctttcagcaaaagctgataataaaatgggatttgaagtaaattcattccattgttcaaaacaccaattatcaaaacaccaatcattgtaccgccaatgctgccgctgcctccggtaaacgaagtgcctcccagcacaacggcggcaatggcgtccatttcaaacccctgacctactgttggcagtgctgaatacattctggctgaaagcattatacccgttacggaagccaataatccgcttataacataagcgagcacctctgctttaaaaatcttgatgccagaaaattgagccgcattacggtttccgccgattgcatatatgtgtctgccaaatctgctttttgaaagcaacaaaccattaaatatcatcagcaccagcattataaaaacaggaaccggaaaaaagccgccaatataaccatttcctataaagctatataaaggatcattaaagtttatcggcaaacctcctgtatagatatacgctattccacgcgcaatattcatcattgcaagggtcacgatgaaagcaggcatatgagtttttgcgattaccaaaccatttataagtccaagagctgtaccggcgacaattcctataaaaatagaaataataaccggtagtcctgaaacactcaaaccaattgcaaatgtacccgatactgcaactattgagccaatagataagtcaattcctcccgaaatcattacaagcgtcataccaaaagccagcaatgcgttggttgatacctgccttaaaatgttcattccattactgactgtaaaaaacttatctgttaaaagcgttacaataatacaaatagcaatcaaaccaataaaaatatacatattccttttaaaaaaggaataaatactatgcccgatatacctaaaaaaatcttttatccggctgttattttccgctaaagacttactatttgtcatcatttcacacctccaactgcataatgcataatattaatttgatttatctgctctttttcctttatatccgcagttattctgccctcatacatgactaaaacccgagtgcataaattaacaatttccggcagttccgacgatatcattaaaatagcgattccttcatcagccaaactttgaatcatacggtacagctcagcctttgttgccacatctattcctctggttggttcatctaaaatgagtattcttggattggttgcaagccattttcctaatactaccttttgctgatttccgccgctcatattaacacagatagtatcctcacctgaatatttgattgcaagatcatttatcaatcggttaattatctgccgctccacttttttatttatcttaaacctttttatatactgttttaaaatagtaagcgtcatattgaatcttaccgtattaatcaaaatcaacccttgttccttcctgtcttcaggaaccaacgcaatcccttcagcaattgcttgagatggattttttatctctgtttttttaccataaagaaaaagctctccgcagctgatacggtcaataccaaaaattgccctcacaagctccgtacggcctgcacccactaatcctgacagtcctaaaatttctcccttatgcagctgaaagctaatatcttgaaatgcgttttttctgctgaatccctttacctccagcaccacttcttttgaaatattatgtttatctgctttatagaattcagaaaccggacgccctgccattaatgtaataagttcatccctttcagtacttttcacatcttttgtagtgatatatcctccgtctctaaaaactgttactcggtctccgatttcaaatatttcctccaatctgtgtgagatatagataatagatattccttttccttttagttcactaataaactcaaataaattttcaacttcattgtcagttagagaagatgtcggttcatccataatgataatacgcgcttccattgaaagtgcctttgcaatttcaaccatctgccggcttgatgtttttaactcagaaatcaatgtctgaggcttgatatgctcgattttcagccgtttaaaaagctcggcggtatcacggttcattttctcatcattcattatatgtatgccggaataaaccggttctcttcccaagtaaacattttgggcaacacttaaattatccgctaaacacaattcctgatgtataatactaattcccaatttcttagaatccgtaacatcgcgaatcataacctctttattatcaattgtaatttttccactatccgcatgatagataccgcccaaaatttttataaaagaagattttccagctccattttcacccaaaagacaatgtacctctccctctgctagatcaaaatggatatcatgcaatatcttaacacctgaaaaggataaattaactccttccgcttctaaaactgttttttttaagcgcatactattcacctctatttccagtcgcagcctaaaaaacaaaactctactttaaaaactcatccacattagatgaatctacaaaatccacatccaataatatctccttagggtattcttctccgttaagaacgccaaagcctacctcagctgccttcactcccattttttcagggaactgtgcggcgcttccaagatactcattgtttttaatcagttcacaaacacgctccgatccatcaactgaaacgattttcacatctccaatcttatttgcactttttgcagccgcatatattccaagaccaatagcatcatttgttccaaaggcgccgtttatatcaggatgtgcctgcagcatattttccatcaatccaagtgcatcctccgtgctgcaagtttgcgcatcctgatattgtacaatattgataccgggataatttttcataacctctttaaatccggtagatctgtcacgggccggacgaatcacatccgttgtaataacaattatatttcctgaaccgtttaaagcttttgccatcgcctctccgcaaagttttcctaacttaatacaatcagaagctacctgggtaactacaagatcagggtcatccaccatagtatccacatccaccaccggaatacctgccgctttacacgattccaaagccggtttaatcccttttgaatcaacaggaacaacaaaaataagatccacttgctgctgaattaaatcctcaatatctgaattttgtttgttctgatcaaattttgcatccagttctattagttctccgcccagttcttcaatctttggcttaattccattactcattgatacatagaaaggatcgttcatcgtcatatatgtaatcccaaaagttttcttttttgtctcattcctgccgccaaagcaggaactcagtgaaacaacgcttgcaaacataaacaaacaagcgatgataagacacacagcacggcttgctttaattttctttttcatgatttttctcctttctttgtgcaccacagttaattctgtgtgacaaacgtaattctgttaggcagtccttccagtttttcagtgcttttaaaacgtgtcggccaagctagatcgtgagcggggattacattattaatatttccatctgccagcattaatatcttttcaaaagactgaagctgatccagctggtcaattccatatcccataggcgtcatggtaataatattctccaaagtataggctgcgtctccggtgactacataccttccatttttagttttaactctcacaacttgcgtaccgtatgaatgcccctttgccaaatacaaatcaattcccggaaaaatgttttccataccgtcctctgacaatataagccggccttcctttttcacctgctcaagcttttttaaatcctccggatccaaataacagttaagtaatttataatcctctgacagacctgcagaccactgccacccctcaagctctgtcctttgcacatatactttagcatttttaaagcaatcaatatttcccacatggtcataatgcaaatgagataacagcactgcatctatttggtcaggatgcaaatttaaaggcttaagataagtctccggtttcaatacattttctgcgttataagcttctataaattgaggatttttaaatcctgtatctacgagaatattgtatccgccgccttgaagtatcgttacattacctggctgatcctctggaaaatctgcatttttctgattatgtgcaccataaaatgtctgtccgcgtccaacatctttaaaaatacagtgctccacaacagtgattttccaacaaatttctttcatttttttcacacctttccatacataattcatcctgtttcaatcctgttcttccaatagatagtagtataaaataaacgacaaatcttgtctgtgtgctcaatctcaaaattatcagcaacagaacatcattatatctgcagatagttattccagcgcttacctaatcccatagcagaaaacattacttctatagaaaatcacaaatatgtattaatagattaacttgtatacgttaccgcaatgttcttcagatgctcataacacacccataaaacaatcctgcattatgtcttaaatatttgccattccatcaaatcataatttctaactgaatccccttgaacgtatcatatcaatcatgtgctttttcatcattgctatcctccttccttcgttgtaatttaataattttattttgtcagccaatcagcaagattacaccaaaacgtatcataatatttccaactcataaaatcaggtgatgcccaatgaggagaacagtctgatgtaaatgcagccgactttcccataccaaaagaacctactgatataaatggatctccgtctatcttagcaatcgttttgcatgccggcaagcatctagcaacagtcttgttgtatcccaggaaacacggccactcctcgttaataccttgcattaccggatgcgtatcatttgacacagtcggaaaaactccttcaggatgttcacatctatcatcataaggcaatatctttaccggaagtacatctgcaacagccgtcttcccatatcttgctctagcatctattcctgaaaaagaaagataacctcctatcatacaaagtgaccctccggcaagcacataatctcttatcgccgtacatttgttattctgcgtatcaccatatgaaaacactctatccgataaaagtaacgtgtttgagccaatgtctgataaaaacacagcgtcatatccgcgcagcttttctactgtgtcaggaaaatgttctcccgcataatgattagggcaaaaatccacttcatatccgccatttttaagagcttttatcagtctgtctcccccctcctcataacgtgaagttgtaaaaatatcaaatcctttaatatgtgttgtaacgcttgtccaagattcacctgcaagcaaaatttttttcattatgaagtctcccttcatttactctttgtaaatatacttcaaactacagcgcatgtactttctcttactactaacagcggcttaaaaactatcttattctgataatcacttttttgtattttatgaaccaacattttagctgccgcttctcccattttctgattcggctgtaaaacagatgttaatgttggaaataaaatctgagtataatctgtatcatcatatccaatcacatttagctgatttggtatttcaattcccatttcctgtgccgctcgataagcaccgcatgccattaaatcattctgtactactaacgccgtaatattattttttaacagtttgtgtgttgccttatatccaccctgatacttataatctgcctgacaaattaattctgactgaaatggaatagaagcctgagctaaagcgtttttaaagcctataaacctgtcatgcgcgcttttatttaacaacggtcctgtaacacagccaatttttttatgtccataatcagttagatgttttaccgctatatatcctcctaaaatattatcaaaagaaacactgtctatttgtgtgttttcctttgaaaatattctgtctaaaataacaaatgggattcctttgagtattgttgtatacgtaatgtctacacttgaacttaacaccggaattaaaataatgccgtctacacatttttgcctcataatatcaatataggctttttcgcgttcgtctgaatcattgcaattgcatagtatcatattatattccatatgccttaacgcaatctctataccttttgccatttcagcaaaatataaatttgaaatatccggcaggattaatcctattaaacctgtttttttagtaaccatactcctggcaactatattcggcgcataccccatttcttttataattttttgtacccgatccacggtttcctttcggaaattttttgtctccttattaataatttttgaaacagtagaaaccgacacatttgctcttgaagcaatgtccttcatctttggattcatcctaaccatctcttttttattagataattaaagttagtaaaacgttttactaaaattatagtatcactcttatatgagtttgtcaatagtgatttgtgtaattttaccaaaaaaaattcccaataaaatcaaaatatattttgattttattgggattttttactgtgtttttatcattaccggatgagccgtactgcttcttactttcaaactgggattcataaccacatgttcatatcttttttcattgattaattccaaagcgcaggatactattttttcgctaagttcatctatcggttgtactatggtcgtcagaggcggctccagtgctccggtcaaatatacattatcaaacccaactaccgacagctgctcaggaatttgaaaattcatttttctgctttgcacatatactcccaaagccatcatatcattacatgcaaataccgccgtaataccgtatttgagtaattcctcaatacctcttgaaccgctttcaatatcaaactccccatgatacactaactgcgaatcataagaaattcccgcattatttagagtctctttatatcccttaagccgttcctgtgaaatttttgaatcatgcggtccacatatacatccaatacgagtatgccccaactcaattaaatgttttaccgccaaacatccacccattttctgattaactgaaactacgctttcttcttttcttaataatccacggtctatccataaaacaggcgtatttgaaaaatcaaaaaatgaattcagcctttttttctgtgcttctgtcatagcataatcaggatatacgattacaatcgtatctacattacgcttttgaaaaatatgcagatattccatacatgtgtcaaaacaagataaggtattaccataaatcacattataattcttctcgctaaacttcctttcaatttctttagcaaaacttgaataaaaaagatcacttatatccggaagtatcagaccaatcgtattagtccgcttcgttaccatacttactgccacctggtttggctgataatttaattcctctactgccttgtatattttatttttcgtctcttttgaaatgtgttcgcccttatggttaagcaccagcgataccgttgtaatagaaattccacatttttttgcaatatcttttattgttactcccatgttatctcctactcattttttattaaaacaataatacaattattaataagttttatattattaatcttttaaatttctaattctatgttgacttttccactttattaggtcataataaaaccaagtaaaacgttttattgacaatcttataaagaaaggatatttattatgaaaattttgaattttggttctctaaactttgattatgtatatcaaatacagcattttccttcacctggcgaaacaatatccgctctgaatagaaaaagattctttggcggaaagggacttaaccaatcgattgcagtacaaagcagcggctatccaatatttcacgccggtcaaatcggacaggacggaaatgatttaataaatgtattaaaaaaacataaaatagacacttctttaatcaatatatgtgatattcccacaggacatgcagttatccttatagattcctccggtgaaaactgcatcgtattggacggcggagcaaatcaaaaaattaccaaggattacgctgattcagtattagagcattttgaaaaaggtgatatactgcttctccaaaatgagatcaattgtcttgaccatattattaaccagtcagcaaaacatggacttaatatagtttttaatccggcgccattcaataaaaatgtattaaaattaccactggagaaaatacagtacctctgtatgaatacaactgagtgtcttggcatttccggaaaaaaagatattaaaagcgcaatttcatggcttttaactaattttccggaaacacatcttttaattacattaggaaagcatggatgtatatatatatacaaaaatacagttctttcgtatggcatttataatgtgccggtagtagatacgactgcagccggtgatacttttatcggttattttattggtcggcttgctcttggtgattctattaaaaaatctcttgaaaccgccagccgagcctcctctttagttgtttcaaaagccggcgcctcaaactcaattcctacaatagaagaagttttcagctctgatattaaatatcaaaaacccgatatactgccttttaatttttaataaatccatgatacacaatttagcattgtatttataacttaacaaataagtttcccctccataattttatatcaaaaatactcgtacagattatctatacgagtactttttatgctttaattataatttaataaaattatttcagagatactattaagcaaactcttccttacttctactctttaccggagtatatcacatctttcattttatgtcaacagatttctgcagattgatttcaattaaatggtatgaattcctttaatctttatctaatttcttatcctatcatccttttgaatcaagttcaaatctacgtgacaatatcctcccggattcttatctagataattctgatgatattcctccgccggataataacataataaaggcaaaacctcggtcacgattggtctgctgtattcacgctgcttattttcaataaattcttgaatagtattaatgtctgcatcgtcaacataataaataccgcttctatattggcttcctatatcatttccctgacgatttttggtcgttggatttatagttttaaagaattcagtaagcagcttatcaagtttaatcatcgaatcatcatattctatcataactgtttccgcatgtcccgtattccctcggcacacatcttcataagtaggatttttcgctgttccatttgcatatccgcattgagtatttacaacacctctcagcaaggagaaataggcttgtgtcccccaaaagcatccgcctgcaaaataaattttcttcttcatgattatttcaccgtcctgatcttagtatagcaataataggaatttactattccttgatatgtgacctgtaaaaaacaccgtaaagacacataaatattgatataataaatgacatagtaaaaatccaaaactcaatgcttcagattcttactatgtcacaaattcattccaattttaaatctcaaatccgccctcgagaataaattgtctaagtaatttatccatctttatatttactttcggaggaacgatttttttgccctcttgttcctcaaaatacaactttgctttctccttattaaatgttttaaataactcatcaaaacgtccgaactcattaatatcactcaatgtaagacctaacgacatcatgttgcggagttttttctcatctaaatcgaatgtggctgcaaactgatgaacttgagcgttcttcgcacgatatagatattcggttatataatctcttaacgattttccttcctcaacggaaacatcacctctttgaatatcatgcaaaaagatatttgcatatttttgttcatcctgcgtgagtgccgcgaacgtcttatgaagctcatttaaggcttcttcctgtgcctcggcggtagcatcatcttgatgaattagtttcatatacttgtcaaagcggctgttcatataatcggcatcaatacgtccggtatctatttctgtaatataaccgaccaaatcataaggaacatcaacttcacctgatcggtcacccggccttctttccgttaattccttatatctttgaactaaaacaagatattgagtttgtgtgaactgaggcatgacatcaagtgttttgcccgtttcttcatctacatacgagtgtttatcccaattaaagccttgaaccttagcagcttccaaacagccgttaaaatccttaaagagtgatgcaaactttgcctttaccgatttttcatccggaagcttttcaaaatcaggaatacccgcatttgtaaataattcggttaactcctgataaatcccgttaagtttttctatgttatgtcccagcttgtcaacaaaaaggtcaaccggtctgtcgccggaataaagcttaacagccgcttctatatttttctccattgtgtgaggttttctgtaatatcttattgtgccgaaaggcttttcgtcttgtctgaaaattcgatttgttcttgaaaatgcctgtattatattttcatactcaagcattttatcaagatataatgtattaacccacttggagtcaaaacctgtaagcatttggtctacaacaatcaataaattaagctgcttttggagtgttttgtcaatcaatttatattgctccttgtgtgccattctgcaggaaatatcctttttgaacgctgcatgcgaagcaatagaaaagtcttgtccaaacgccttgttatagtcctctatgatttcaataagtccattttccttaaaaaaagctattttttcacctttatattctttataatcgccgtcctcattgctgatattcgggtcaaataagcaagtggttttcagctgaggcatttccgacttaataagtctatagtaatctatagcttcaggaatactgcttgtggcaaaaatagcgtgaaatttgctgttacggcttaaatcctgccatttttcttttatatcttctacaactttcttttgatgttcttcggttctgtactgtgaaaagggtatgtaatcctcaatacctttaatatattttccgtcatctgttttatagcctgccataggaacttgtgacgcatccatatatttatagtatatcgctgacttatccgggttattaaaaacctcatcagcgtcttttgcttttgccttctccaatgccacgtgccggcgaatatcggaatctttaaaagtcaagaccttataagggtcaaatcccaacacattaccgtcgcgaataccgtctgcaatgctgtatctgtgcagctcgtttccgaatactgttgatgtagtgttcattttcttttgattttcttttttaataggtgtgcctgtaaaaccaaagaaaatagcgtttggaaatgtttctttaattgtaagcagcatatcgccgaatgttgacctgtgagcttcatcaactataaataccaagcgttttttattgattatatcaatatcatgggcatttgaacaaccatcttcagatttgatgttgctcattttctgaatagatgtaacgataagagtatctgcagaatcaatgcttttcagctttgaaataagcacatatgtattttcggttttttgaacactttcattctcatctgcaaaattgttatactcattatatgactgtgtgcccagctcgattctgtctgtcaagaatataaccttatcggcatctcttgaatttgcaataagctgtgctgatttaaaactcgtcatcgtctttcccgaacctgttgtgtgccatatatatccgccgcgctgattagacttgtcccattttgttttggaaactttatcggatatagcgcttgcggcataatactgatagcttctcattactttcaaaacgccgtctgagttatcggcaacagtgtaaaagcctatcatttgatgagccataggaatggatagcagcgatgaagctattgacttccaattatttatcggttcgttatcaaaatccgcccaattaaaatagtaattcggattgaaactgccgtccggtccgggattggcaaagtatttgctctcctccggcgtcattgcaacaaatatttgcaccaacgaaaatagtccggtaaagacaccctcatgcgaatatttttctatttgccggcaagcttggcttacaggaataccgctctttttcagctcaatatgaataaccggcattccgttaatcaaaagcattaaatcaccacgacgatcattcaatatttttgactttgccggaaaaacaggctgctgtactatctgataacggctttgacctgcggcgatttcccggcggtcataaattttcaagctgatttcttttccgaaatgctgcttatcattgggattatctctgataatagataccgttttaccgtttataaatccgtttagcttaagcggagtacgcaaattattgatttgttccataatctgctgcatttcgccgtttgtcagcggatagttattaagcctatcaattccacggttattttcaaataaaatgtttgcccaattatcaatcaagtcctgttctgtgggatgacttatcacttcattctcccaacccttgtttgaaaggacttttataagggcctcctcaaaatcggcctcttttgtgaacggcataatctttctccttccttaatttaatgaggaattagcaattaggaattatctatattttgtcgattttgtaatactcgatagaagttttaataattctgtgcagtcgctatcaatgctattatattgctctttgctcaagtattcagttttatatagtaactcaagccaatattttgtttccgaacactctttaaatgcaatatacatttttgcaagaaagtcttttttactgaaggcacattccgcctctgcaatatttgcaccaatgctcgttccgcttcttaaaatctattttgacattacaaactcttttttattttcatacatatatttataaagttgaatgattctaacagcaaaagcctttgatttttcaacaactacattttctttcattactaattcctcactcctcattcctaattatcaaacgaacatcttttcaagacaagatttcttgatattttgcagcttttctaacttacgctgatgaagggcgatgagattgtcaaagtttttaaaaaatctgcctattttcctttgtatatcaaccgaacgaggaatgagaagtgagtaattagcaatgttttcttttgacaaactcggtacaccggttgactcatcaagcttcttccaatcaatcgtttgaaaaactgcatatataaaatttaagtcaatgttgttttgcggaatgcaataaaatagcgtatctaccgtccaaaatggtgcttttaatacatatggtctatcaattgtgcctttcctgccaatccctattgcatcatcatatgacaatgcttcactaacactaagcatatatccgcctgttccataaacaggaatattcccatctgaaagatgtttgtagtccttaccattgccaatgcttactatatcgccaatgcttactatataccattcctcactcctaatttctaattcctcattatcattacgctgttcccaatcatcagtaaatccggcaaaacgaatttcgggcactttgcgtccatttttaggaaacatcttttcgagcatggatttttttacattcttcaacttatcacacttacgatgatgaagggtgataagttggtcaagttgcttaaaatatgtgccaattgcttcttgttctttgcgtccaggaactacaactacctttgtaagaagttcatctttggtaagcccttttatagaagttccttgtacggaattgagttcgctttgcagttttttatagagcaagtaggaagtaaaaactatatcagttttcagcttgcttaatgacaaaaaatcctggcttgtagcataagaaaacggcattacagcaagctttccaacgaccactcgagtaataatagcaatggagttctctggtacaattttggttgccgaacttagtactgcctcatttgaaatatactttctaggagtcaccccaaagacttgatgttcggacaggtcggatgattggatccacggtattgtaccattccaaaatctgtcgtttgatgtggttggagtaccgcctccatatgtatcagaagctaattcgccaaccttacgctgctcccaatcaccggtaaatccggcaaatctgacaaccggtttctttttttctgacatcttattcacctagaagcagcgatttgaactcgctgagccctttcatgtcaaattcatttcccacaagttcgtcaatcatttctgccagtgttgactctgtttccttgatttgtgcctcaatctcgtcaagtgtagtatcatatttggtctgtaatgcagagattttacttacaagtgtgtctacaagtgtgtccggtaatccttttagcccctcaataagcggttcaatccacttcttttcaagcaacatatacacctgttcatcgctcagattttcaatagttatctttgttttcttctgcagttctgctgacttcttttttattgaggattttaattctttttcttcctttgcgagcttttcatatgttttaagtttttcgataaatttagctgtttcggtcgttttctcctcatttttcaatgccttgagctttttggttacttcctttgcgacaaagctgtcaccggattcattaagaatatcactttccttttcctcttcagtcaggctttcgagcagctcctcatattcagatggaatttctgaaagacgattctcatcggctacaagctcagcatagtcatcactgagtaaagtttctccgacaagctcaaaaggaataacatgacctgtccaaccgtcctgtatttcttcatccttgccatttttcttttttattatcagctttgggtcaaccttttttgctgcttcaaagccttcagtctgaatgatttccaagtcgacagagatgcctgaccaattatcatcaagaatttgatatgcttcataacggtcaatcaaaggaatatttttaagcctgtcaaaaatattttcgctcaaatcaccttcagtctttgttatggcaagcactgtcatttttgataagagttcatcttttagaaagtcagagaagttcgcaaaggtgtctccgaaagctttttcaaactcaataacatcagcatgattttttatttgcgatttaatatcattcgctgcaagtgttacatatggactgccgttatcgttaaacagagtctgtttcaaattcgggaacgctttccaatactcacacaatttgtctatttcggacttcggtattcctccgaacatagaagcataaatatcccaagactctgcactttcggaactatcaacataacgtgggatattaagattataatcattttttcgtatttcatcttgagttacaactcttgaaaatttcggataatcagctcttgcagcaacagcgtccgatatacgtttaatatcagatgcacgaagcttgttgtttttgccctctttaataaaaccctttgaagcgtcaattatcaagacatcggtattttctcttttttgtttaagtaccattattatcgtcggaatacctgttccgaaaaatatatttgcaggaagtccgattattgcgtcaatatggttgttttcaataagatttttgcggatttcgccctcctcaccgccacggaataacacaccgtgaggaagtacaatagtcataattccgtcaggctttatatggaacaagtcatgcagcaaaaaggcatagtctgcttttcctttcggtgcaagaccgaagcgtgaatatcttgcgtcagactctttattggacggatcccaggcctgcgaatacggcggatttgataccaccgcatccacatacaatgtctcgtatgtattaaccgggtcgttttcatcaaaaaacggccaatcttcttcaagcgtatcagcacatcttgtcgtgatgttggacggattaattcctctcataacaaggttcatacgggtaagattatatgtattttcttttagctcctgtgcataatactttatattatcggaatttggcatatactttgaaacactcttgccaatattaatcagcagcgaacctgaaccgctagtcgaatcatagatttcaatttcatttttgccttttaaatggtttgcaacgatttcggacatcaataaagaaacctcgtgaggtgtataaaactctcctgctttctttccggcattggctgcaaacttttcaattaagtattcataaataaaacctaaaacatcataatcctgtttgccgtccatgggaatatccttgataagctgcaaaagaccgctgatagcttttgttcttgcacctgaactgtcgccaagctttgataagcctgtttcaagcgtttgaaaaatcttctcaaatacttttttatgcgagctgctgatatttctgttgaaagccgaaagtgcatccgtcacatttgatacatcaaaatctctgccgatagatatccaagtagagaaaagattattataagatataaagtatccgaggttctgctgaacccatctgaccgtttcgtcatcatcttcagtcaccgtaggcagcagctcatccgtgtagtcgttttctattaaaaactttacttccttatcagataagtatttataaaaaataaagcccaagatataatctttatattcgttggcttcaattttagagcgcattttgtttgctgattcccaaatacggtttgcaagctgttgtttattcatctaaaagtccctttctgattgtatttctactatgatatgtcatttttactatcctaaaaaatagactttgctgtattgtccgcagcttttttgtcgggaataaactccataatatcatccgtagtgcaattcaaaaccccgcatatttttccgagaacctctgttgtcacattctcgtcccgtccaagctttaacattgcatatcccgataatccggcagcctcctgcaaatcttttttcttcatatctctgtcaagcaacatatgccatagctttttataactaacagtcattttgtcaaccctttctctctgtatgagtataagtgattataactatattatagcatataattctcggtatttcaatgattttgtcgaaaaagcaaaactgttttgttcgctctattaacttttcttaatgattattaacatgctatgacatcaacttagtacagcgtaataataatgaggaattaaaaattaggagtgaggaatggtattgagtaagcataggcactgataaggactgcaaataactttcagaagagaatattcctgtttattaacaggtggatatatgcttagtgttagtgaaacattgtcatatagattccctttccttgaaattaatggcgtttgatatccttgatatatccttttttaatacagcataaccatgcacaaaaacgaccatcattttttatacatagtccaaagggggttacttttaaccgaaacgatttaggaaataaaaaccacagaaaataaaaaaaccgaagccaaaactgactccgattttttctcctaaaacgcaaaaaatgatagtagctatccttgaaaatcggcgtataaatgcggacattttagcagagtatgtagtggaatagacacaaaaatatagggtttgagaaaccgcataaaacctcacttttttaacactcaaaacggttaaaactcaagggggtgcgtatagcatcattccaaccatcgaaaaactacttccatttttccacgcacaattatcaaattattctttttgacatttcgggcaatacacgctgcttctgccgccaattacaatgcggcaaagcgtttcaccgcatttgaggcaaggctcgccatcgtgcccatagacttgcaggaacggagtattgcgatattctttgcctttggtttcgatatattcctctgacgttaattcattcttttctataaaatatgaaagacgctcggaaataatcgtcgccagccgttcccactccttggttgtcaagctgcttgcgctcttagcaggataaatttccgccgtaaatagtatttcatcagaatatatattgccaatgcccgctataacgctctgttcgagcaaacattccttaatcgttttttttcgtttttcaaaatgcatacttagatattcagcgttcagcttatcagaaaatggctctatgcctaaattatcaattccgctgtatatatcaggttcgccatttttaatcagccaaaaccgcccgaaacggcgcgtatcagaaaagcgaagttccattccgttatttaatgcaaagacaatatgcgtatgcttttccggcggtaaatccggcggggcgagaagcaagcagcctgtcattcgtaaatgcaaaactatataatcgccgctgtccattgtaaaaatcaaaaactttccgcgccgtcccattgatgaaaagatttgtcctgtaagctgttcgcaaaatttactcgcagtggggtgcgctattacgtcgcggtttacgattatgttttcaatcgtcagaccttgtatttgcggctcaatcacattttttattgtttccacttctggcaattcaggcattttgtatttttcctttctttgcagattttttgatttcctcgtgataaaagaaatttacgacaacaggcggcgcgtcaaacggatttttcatactatcatcatctctgacgtacttcaaaccgttggttttagcataagaacggatttgatcgtccaaatttctccaatataaacgactgcctctaatataaatatcctcatatagcggaagtaaatccgcgtgcttctctttgataaagtccattataactgatttataactgcctcgcaaattcaggttttcaatccatacgagattacaatgcttctttactctgtctattatctcctttacgtcagtaattcccggaaagattggcgaaataaagcaagtggtgcggataccctcactgtgcaatttttccatggctgatagtcggcgcttaatactaacagcggtatccatatcatttttaaagccttcatcaagcgtatttatgctgaaaccgactcttgcgtcaggaaaagtttttatcaggtcaatatcccgcaaaacaaggtcggattttgtttgaatactcagctttgctccgctcccctgtaattcttggagtaaagtgcgcgtccgtccgtactgttcttcgagtggctgataggggtctgttaccgagccgataaacaattccttgccagcgtatttttcaggcttttttaaggcattccaatacttcacatctacaaaatctccccacgcttccgcatggttggtaaaacgcttcataaaacaggcgtagcagtatttacaagcgtgttcgcagccgacatagggatttacggaataatcgctgacaggcaaatttgattttgttaatacgctttttgtttcgatttcctgtattatcatagctgatattactccaatatcaccatttgcctgtgtgaatatgactgtcgggcgtactgtcatactgctccaaaacaaactcgtcctctttaggatatccaataccgataaaacaaggcgtcatccagcctttgggaacgccgagcttgtcaagcacaacgtcgtgttctctgttcagcggaatacgcatggagtaaccaagtccttcgttaatgacggcaagcataatattttccgcaacgcaccacgcggtagtaagcggatttagtttgctgacccattcggcattgagctttgaacacttaaacaggggaacgattacgtacggacaatcggtaagcattgtgtactgacgcggcatagcatatgcgtacatttcctgcgctaaattcagctttctgttttcatatctccctatgtcaaacctgtttaccacctgtcttgcatagctaaaagcattctctttttcctctttggtatgcaaaatgataaactgccaattccggtagtgatcccacgacggcgctttcatacccgctccgacaattctttttatggcttcaaaatcaacctctctatccgtccattctctgcttgtttttcttttatttataacctcgttaaattccatttttaatgctcctttataaacgatttctgtgcgccctgttgtacggtgtcggtttcttttaactctcccaacaataacggcgatgcgggattgtgatatttataattctcaaacgccttttggggatttttatttgcgtaacaatatttacaaccgttcatacaagtgtcatacgcacctatgtcgcgtgtttcaatgcaatgacagccctgacgcatacccttatgtttcagatttctgaaagtgatgccgtttgcgttacctaaaatatcaagcgtcatacagcctgattgttgaataccatagcgcgtaaaatcaccgtttgtgccgcaagtctgaattgtcataccgtatttagccgcgatttttcctaagccttgcgctaaaatatccatatcctcaaccgacatcataataatctcaggcatatttgcctgcagttttttatacatctccacaaagctgaaaatacagcggtcaatatgcggcgcaagggttttcgacattctttcaaatttttcaaaatgacgctctattgtgtaatcctttgttaaaagcaccgggtcatacctccacgcaacgcgctgcgccccgacctgctccgagagcttaatcagtgtttccatacttttctctatcgacggtacgcccggctcaatatccttgccataggcggtaattgtatagtgaaaatatgtattgaatttatctgtgatctcactaagacgcggcagtatcggcttataatttttcgagcagaaaacaaccgtgtcaaccctgtcaggcgtcagctcgtatcgagttaccttattcggaaacagtggattgcgcgagagaacataaccctccttaaaacgcgttaaaagccaatcggtataatattggacagtatcagtccgtccgcctgtgtttataatcattgtactacctcactatattttcctctattaacttcccgccgtcatagtaaatatcatcgtcagatgttatctctcttttgataaccgccggagttcccattgcgattacattagcaggaatatccttcgttaccacagagcctgcgccgatgatggagttgtcgcctatatgtactcccggcattaccgtaacatttgacgcaagccagacatttttgcctctatatacaggcttgttacagccataaccctcgcagcgcagcttgggcgacacggggtgcgacgcggaagtgattgttacattcggcgaaatcattgtgttgttgcctatgtaaatattcgcgtcgtccacaaaaatgcagttgaaatttatgtacacgtctttacccaaatgaacgtgctgtcccgcgcacattgcgtgaaacggaacctgaatgtatgcaccgtcgcctacctccgcaaacagcttttgcagatttttctattttttcttttcaccgcgcttagtgtagcctgccgcattgtacttttccattagtcgcagcctttttagataatcggtattatcgcttgtgagcgtccacacattatatatttttcccgaatttaaaatttcctcatattccatcattcatttttcctccgatattattaaatctctctttcatacaataagcaaaaagtgttgtaatgcgtaccaattccgcaatatccgtatcagacaattcacccatagcatctatttccgcattagctgcgggcggtatgattttctttgcgtattccctaccctcatctgtaaaacaaacaattttgtttcggcggtctgtttctgactccgtcagcgacagataaccctgcttccaaaacttttttataatcgcgcttatagtctgctttgtcgcggacagtctttcgcaaatttcagattgcagacagccatcgggtgcgaaccatattatgtccaacacaaacagttcttttgcagtcagattgtgcttccttgcatataattcataagcggaaaattgaatatcccgcagaacgcagtattgatttacatagcttcgtacttcttcgcgtttcataaaagcctccataaaatatttgatagtctaatattgtacttattgtaaaatagatgacatgttttgtcaatggcgagtatagaaattattattctaaatcaatgataaaattgatattaaatatattgcacaaaaaaatgtgaagctacctacttcacatttttgttctttcgtctgttatatcctcaaatatttggtctttatcaaataccaaactatcatatatcagcttaactccgagccgaaaaacgagcttaaaattttctaaacttccgactgcggttatttcatcgtgagcgtttataaggtcgataaatatttttgcctctttatcctctaacagctcattcagtttattttcgcaagcgtaaaatcgtttaagcgcttttacgtattgagaatttctgttatattgcttttgattaggttgtatattccgataatacaattcctctataaaattcatcttgtgtcctcaaacaacagttttcttgcaatcgttaattccgcattgtcaacactcggtacgtcccaatagcaaaagtcgcccacacggtcaacggcgagattctaattcggatttacagattgatgaatccttgtatacgcttcatcaagagctgtgttgcagttattgtcgttctgtacatctgtaattatatacaagctgaattgaaacagcaaggagagcaatccgaaaacttggaacgctttattgaaaagatacataaatattttgatttgcaagaactgatgccggccatattaaatgatatagaaaaatgtgttcacgtccacgcgtccaaaaaaattgacgaacatagaacgcaaaaaattgatatttattatgacttggtggactttttgcctttactgaatttgtattacggtacaagtcaatctcaatatttccgtttaaaacagcatataattatacacaaaaaatgaccataattttttgtacatagtgcaaaggggtatacttttaaccgaaatgcaaaaaggggtaaaaatcactgaaaactaaaaaactgaagctaaaactgactccgaattttctcctaaaacgcaaaaaaggcttgaaaccaagcctttttcattgtatcaactttatagttgaaatatggctcctccagttggactcgaaccaacgaccctgcggttaacagccgcatgctctaccagctgagctatagaggaatatatcaaactcaacggataatagtatactattttttttatccattgtcaatactttttttaaaattttttaaatttttttgtaggattacaatagatgtgttacaaagagaaaaaaagaatacggaaaactcataaattgtgttatagttatatcaccataatatcacatacacaaaggagtcttccgtatatgaacactataacacaaactatgagatttaggcaagtattaattgaatattcttttaaacacggcgtgacaaaggctgccattcgctataaggtaaatcgtcagtatgtctatcgctggcgaaaacgttacgacggtacgctcgcctccttagccgataaatcacataaacctcaccatcatcccaatcagcataccgctgatgagttgaaattgattactgagcgtctactgatcttacatatccgtctccgtttatgtccgccgtatgcgctatcactgtattggctgtctctccctccattactgacagtctgtccttaacttcctgctccgtaattgttgttccgttgttcgatacaaatgccgcatatcctcccaggccttctgagtaatacatttctattgctgctgttccggctgactgcaatacatatttggcattttcattctttgctgtcgttactactaccaaatcttttccgctcggcgccgcattgtaactgtcgtgcgctacaatctttaccgttcctgttattactcctgcatatatctggatattctctccaaacatctgatatgggattgtatatactccgttgcttcctgttaagtatcctttgtttcctccgtttactgtgtaatatacatatcctactatatcaccgctgtttgccggctctacactgaacgttatatctgttccatatgtcgcttttccgtctgttactcctgtctctcctgtatacgctccatttgtcacagtattaaatgttacgctatactgggcttctgtatatgccgctgtcaatgttgcgtctcctgtcacttcatatgtactcaggtctatctttacatctccgctcatccagccatccggattatatcctgcttctgcttctattgtcggcaggtctgactgcagcaattttgagtttacatcctttgctatctctgtcactgctcccgctgcaaaacttccgtgtgttcccggctcaaatgttatcttgtattggcgcactgcctgagctgtcagacttgtatcttccgtatatgttcctgttgtcaaatctgtgcttgtataccctgttcctccgcttgttttccacagcggttcctctgttgtatcttttgccaaacggtagttctcgtttgcagttaccagtccctttatttgcgtatctgtcactgccgtagtataactgtcgtctgtgtatagtcctgctgtattatactttgtataatatgctgccggtgaacctgaaacagtgtttccatctccgcttgagagtgttacttttaggttatacagattaacggtttcagctgttgatactgctgctatatcagtatcagctcctgttggtgcaaaatatccgtccttcgttcctactgatacattagccgctgtttctattcctctatttactgtatactttactgtcattatagttacagcttcgcttgatacatcaaccgagctgcttcctgacgtatacgcaatcttattttgctccgctccttctccctgcaccaaattatatccgtttgtttttatagcgtctgacgcttctactgatgtcaatgtcatttttgtgctgtcatagtcaagagctatattaaagcttccgaaattagtcggttcactggacttaacttttaccgctaccgctatctcgtcaccggggttaaagttctcgtttgacggcgttactaattctgtaaccaactcatatcccaaactgtcagttattgcatatgtgctcaaatgctttaactttgttattacctttttgcctgctgtgtcatatgccgacgctactcctgatttttctccggcgtcatttatatacactactgatacttttgaaggatttgttactgccgcctcggtttcatacggcacttttagtgtcaagtttccgtttgagcctgctgagctttccggcaacaattctgtagttcctgacatcaattttacgtctataacttttgctccggacattatcatattatttactgtttcattgctgctggcttcaagcaaatcaatttttaggctaactccctcgcttccagctgtattagaaactttttcaaaggcaaccttatctaattcaacttctgctacatccgtattgatagttacactatcaggagccgcactgcttatgctgtcaaccaaatcctttggaatacttacatcactgtttttaacttcactgcttggctcatcggttgttgacgcatttattacaggatttcctgtatctatccctgttactttactatcatcaacaactacagtctgagtgaaaaccgcagtgattaaaactccgttttcaggcattacaaaactgtatacaccatcattaaacggaataattaccggctgagctccgtcaatggattcagtatatgtcaaactgccgtctgcgagattatatcccacatcaggagtaacagtaacgactacagtatcaccaatattagcatttggattttcaatgctgactgttcctccggtaatacccgaatcaatggtcacgccttttgaaattgaagaaaatgctattccgttataataatatgttccggcatcaagttttgtatcaagccatgacgcgccatcagcatttccaacaatatatctggattttttatctgaatcaacgcttccggttatatttgctgtactatcgctggcaaataattttgatgaatttccaaaatcaaatgttgaatttacgctcttaaaatctttaaaaacaaagttcttaatatcaaacgcatttgtaacattttcaaaagaacaattcatgttctcaaaactaaatcccatagcagtaccattggttgctccgtttaaatatacaccgtctgaaatgtttttaatttttaaattaacgttcttaaactcgctcattctatctgtcttgtaacgggtaacaattgcagactcaccagtgttattcatatcaataacaagagacggtgaaccgctgtttccggcactaacaccttcaatagttgaaacacctgttccgatagcatgagcagaagcatttgtacctgtatactttatagaattatttccacaaagcattattttaacattatcattattagacaatattattgaattattaactttcgctgcctgactgtctgcaactgtaaccttttcagtttcaattgttacgttattcagaatcaaaacatcttcatacggcagccactttataccatatgatgcaaggtcagattcactcattgtatttaatactgaacctaccgtatacatatccaaacaatcggtatatatttttccatttccgctttggacagtatagtattcgctgtcttcagatactccgctaaaattccagcttccggattcaatattgtatgtaccagccggtattttattgattccatatagatatgtatcagattcaaactttatgtttcctgattcacttgaaacaaccggcaattttgtaaaagcttgaaatcttatgttactcagcgtaatatttccgcttatagcgatattcttgtcggcctgagtagtctcaatcgcttttgatacattttgaatcaaagttgtgccgcctataatattaacatttcctgtgtctgaactaattccattagaaattatttgatttccgtcttttattgctgcagtacaattattaaagtttatatcacctgatgctgatattccatattttcttcctgtaatgttaaattcagaattctcagcattaatatttcctttaatttttactgccgcactgtttcccgaatttcctgtaacagtaatttttgtattattaaaagatacattgttatttgttacactaataccatatgaaaacaagtttgtaataacaatttcagaattttcaaatacaggaaccatattggtgctcttgatatttatagccgcatttagactagaattttcttctaatgaaactatatttacatttgcattcttaaatcccagttctgattctgttgttgctgtgaaatatattccatagccgcagccgcttatattgagtacgccggaagttactttatcactggaaattattccgcttttcatatcaatgccgcgaactgaatttttagctgtatttgtatttttcacattattcgttcccatcaaaactatatttgtattatcagggagcataatcatctttccgctggataaagaagtttcaatatttgcgttataaagtgtcaaagtatggcttccatctgtgttatcttcaaaatatattccataatccttttgctgctgctctgtcaaaggattacttgaagtaaaatcaagttttgtttcacactttactgtaccgggggttttagcctcgcctgccggctccttatcagaatttggatatgcaaatgttactgctaaatcaagtatattgctgtcccccaacgatttaaaatatccgctttcacgtacgtcagaatatttatatgcaatagctgggcttttttcaaatatacgtacttctactccaaaatcttctcctgttgataactgttcttctgtatatgtctgtaccggatgtaatgttattgtctctttatcaaaatcttctaatgttactccatcttttaacctaaaataaaaactcattaagtccaaagagttaacagctttcgacactggcgttgtccatcctgctgtcattcttactgcttttcttccttctatatcagcatgatataattcatttgctactgctgcgcctgcttttgatgctacttccagcgcacctgacacagttattctattatcttgatccggttctgtatataataaatcgctgtattgatcatttgataaatcaccaatcgcatataccggctgtatcttagaatcgtcgtaatttaatactgtctctaccatctgtaaatttgccggtgctgataaattacatactatcttatatatttgtttattatcagattccctaactcctgcttcctgccaattgagtgcaacttccggcactgtcacgtcagccagctctgcttcactgctaccgtctataatttcttcattgttttcttcagtttttatttcatcaacactgtcagaaatatttgcatcagacaaattattatcagcaaatacaaaagtcggagataaactgaacaacatcaccaacgccaacaacaaacaaccaagattctttttaatactcatttttcttcctccaaaatattttataatccataataattttctataatgtaagtcttatttagtaaaagaacgtcctacaacagtataaagaactgcagctatatcacttgtgtctaccgcgtcgtcactgttataatagtttgcttttattctcatttcgtctgatgtgtcccctattcggttgttgtaatacaggtcgtttactatcattgcgtctactgatcttacatatccgtctccgtttatgtccgccgtatgcgctatcactgtattggctgtctctccctccattactgacagtctgtccttaacttcctgctccgtaattgttgttccgttgttcgatacaaatgccgcatatcctcccaggccttctgagtaatacatttctattgctgctgttccggctgactgcaatacatatttggcattttcattctttgctgtcgttactactaccaaatcttttccgctcggcgccgcattgtaactgtcgtgcgctacaatctttaccgttcctgttattactcctgcatatatctggatattctctccaaacatctgatatgggattgtatatactccgttgcttcctgttaagtatcctttgtttcctccgtttactgtgtaatatacatatcctactatatcaccgctgtttgccggctctacactgaacgttatatctgttccatatgtcgcttttccgtctgttactcctgtctctcctgtatacgctccatttgtcacagtattaaatgttacgctatactgggcttctgtatatgccgctgtcaatgttgcgtctcctgtcacttcatatgtactcaggtctatctttacatctccgctcatccagccatccggattatatcctgcttctgcttctattgtcggcaggtctgactgcagcaattttgagtttacatcctttgctatctctgtcactgctcccgctgcaaaacttccgtgtgttcccggctcaaatgttatcttgtattggcgcactgcctgagctgtcagacttgtatcttccgtatatgttcctgttgtcaaatctgtgcttgtataccctgttcctccgcttgttttccacagcggttcctctgttgtatcttttgccaaacggtagttctcgtttgcagttaccagtccctttatttgcgtatctgtcactgccgtagtataactgtcgtctgtgtatagtcctgctgtattatactttgtataatatgctgccggtgaacctgaaacagtgtttccatctccgcttgagagtgttacttttaggttatacagattaacggtttcagctgttgatactgctgctatatcagtatcagctcctgttggtgcaaaatatccgtccttcgttcctactgatacattagccgctgtttctattcctctatttactgtatactttactgtcattatagttacagcttcgcttgatacatcaaccgagctgcttcctgacgtatacgcaatcttattttgctccgctccttctccctgcaccaaattatatccgtttgtttttatagcgtctgacgcttctactgatgtcaatgtcatttttgtgctgtcatagtcaagagctatattaaagcttccgaaattagtcggttcactggacttaacttttaccgctaccgctatctcgtcaccggggttaaagttctcgtttgacggcgttactaattctgtaaccaactcatatcccaaactgtcagttattgcatatgtgctcaaatgctttaactttgttattacctttttgcctgctgtgtcatatgccgacgctactcctgatttttctccggcgtcatttatatacactactgatacttttgaaggatttgttactgccgcctcggtttcatacggcacttttagtgtcaagtttccgtttgagcctgctgagctttccggcaacaattctgtagttcctgacatcatgtctaatgtgcgtgtagatatcttgagttaattttatgtctttgtgtcccattaattcttgagcgtcttttgcttctattccggcctcaaaaagcattgtcgcataagcatgccgtaattgatgagcggttaatgttaaattattttctttgcgcattttgtcccagcgacaagcaagctgttttttggttaaatagtcttcatgctcgttacagaaaattatgccatgttttttattcggcaaatattttgcaactctgtccaaaagtataactgttcttgttccggattctgttttagtttcgtatattaatattgggttatttccgtcatgtacaatttttttgtttacatttataattttattttctctgtcaatatcttcgtaattcaaagcaagcgcttcactaattctaaggccggtatataacagaaagtaggccaaaaatccaaatccctcatgtaaggtgttaacgatttctatttctttggtgtcgggcattttacgtattgatttttttaaattctttggtagtgaaacagatgtaaccgggtttatgttagcatatccattaactatagcaaatttaaatatttgattaaaaacacttttatatgttgccactgtcttctgtgcgtaatcttttgcggcaagccgctttaaaaatatatcaacgtcatgcgatgtaatgttttttatccgttcatttccaaactcttgtaatagagataaatatgcgctttttccgcattttttaaaagtggtatatggtgtgtttaataaatattcgtcgagccattcctcggcaacagttttaaaaatttctcctttttctttggtgtcttgataggctaaaatctttctgttaatttctctttctgatttgccgtaaaaggatttaatttttccgttaatccgtatctgtttacagtaccttccatcggctcgttttttcattgtattcacccttcttacatttgtgatgcttttttatccaaagtgtgggaatggttgttgcactttttgcaacaaccaattattttaacttctcctgcagcataattaacgcacccaggaggacataccattacatcatatcaatatggcggcgataacgtcttggtatatcaataccaaccatataaccgatttcgtttaacgctaatggtatgatggaaaatccgtctttgtaaaatctttggatacgttttgatttgttggtcatacggccacttatttcaatccactcacccgtatagggtgcgaccctaataataccttttggttggcttcaccgaaatggtcggtaatttcttgatgactgtttttacacgcttccattgctttataaataacaactaaaaaattctgatagtctttatattcaagagcttttgcaagctctcttgctgaccagaattctgcaccatatttgttaacatgttttattccttcaaagatacacattgataactcatcctttgcgacttgtatatctgttgctctcttgctggcgcaggggagctttttatatttatgtattttatacgtgacggctatgccttgagcaagtcagctcttttttcttcattcaatcatctatattctgtcgttatataaatcaaaatagatatcatatccggcttcactgttgtcacctatatatgttttcacttctatgcagtttccccagaacaccatcacatattttacgggtccgcctgttccataggcttcatcggaaaaattccaactgccgtatccgatagcggtgttgggactaacgaattcagcaatagatgaattataagtcaccgagtgtcccggcttttgatagtcaaaatcaaaatacacaataccgtcacttattgaatttatcgttagcgtatgaccgaaccaatatcgaccgtttggttcaatactcttgtagaatctacctatacatgggttcaatgctagataatcagtcaaaatccaaccgacaagaccattatatataacttggttaaaactattatcccaaccaatgctttcaacttgcgcgccaaggggcacctgtatcaactcttcagcatttacgctcggggatgttctcaatgtgacagattgttggcaattgaccacatccattgtctcggcacatgtcgtcatcgccacacttaaagtcattataataacaacgattaagctaactatttttttcatttctaaatcctcctttaatattcataatatatatatttattttttcttctaaatctgaaattctttttctttaaatataccgcttaatccaattttgaccaatgcctttctaataatatagcaaaatatttttttaaaatttatttattatttgaaatacagatttcacaaggttgatatcccgcctgtatggcttcatcagctgtcatatgtattaaattagttttattttttatataactgcagtttgggttatgatacttttgtcctgtttttgtaactatcacgtccgttatttgaggagcaggtgtagcttcctgagttttttgagtgtagtctatattctcctgattatttttatagtctgctgttattgtagctgttattagtaatattgctgttattattgctacgacaatatatttgatttttatagttttatcttttatttcgttaaattgatcacataatttttcttcatactctgtatattttttgtgcttacgtacttcatcagccactaagttgcttcgtttatcatctagtaacgttgttgctgatataagctgaggcgtatttatatgcttttgtgacaaaatgcatacaggtgcaagaaattcgagtgcaaattcatttgcttcgtcttcctgcccctcatcaattaatccacctggtttatatcctaatatgttgttgctagacatatgccccaaaattatatgacctaattcatgagctaataacatacgtttatcattagcagacaaaccggagcgaataaatacaattttttctgttttacgcttataagtaaacgcttttgtccgttttgcaattgcaaaaatgttgtattgtttgagcaattcaatttgtttgccgttgtttacatcatattttaagatgctccagccttttgcctttaataagtcttctataagatttatagtaattggcaatttgtttattttattttctaacaaagtaattactgcactgtatcttgcaaacactatgatacctcctgaaatcaatttcatataaagatatcataatgctatatggtttttatttcaagtggcaataactgttaattactgttcatcatcgacaaatgatgattcttcaccatatgccgctgtttgtgaagaatcaatgttttgaaattgttcagtaacagtttcttcaccatattcctttgtttgtgaaaaatcaatattttggagttgttcgttgatagtttcttcaacgggagattctatttgaattctattacatatatcttgagggggttgaaggccaatgtaatcaacggtattaccgctaaaaaatacgctcaatattatagaaattatctcaatataaagtgatattttgttatatttttcattttctttttctgcttcttcgtataaagaattacttttttttaattcattaatttcttgttcttttaaagaattactttttactaattcgtcttttacttctttaaaaagtgaaacaatttcatcagaagtgtcattactattgctcagttttcttatagcatttatggtgtattcagtatttgattccgcagattcttcacattttatataatcttcatttgtttttgtttcaacaaaagtgtcaataaaattattttccattgaaataatatcgtcaataaaagattctattgtttgttctggcaaatttgaaaatatagaactaatggaatttttaaagttagaatagagagtatttgatatacctaaacttggtaatgatgaatacaaatctgtagtgttttgaatatttatttttgtaatactgtcattaatatttatagtatttaacttgttgcttagcttatagttcatgttttgcagtttttttgcaatagaaaaaagagtagtttctgatagaatcgaaacaacgttattatcttttattttattaatcatttccatcctaggaatacaagatttctctaactcagttttaaatgacatatccgttgtaaaaggactttcgcaaaatggtgttagtttagttttaactccagtaatatagctcaatgcattatcaatattgcgtattttcgattttaataaattttcttgaattgatacaattttttggcattttattaatttatcaaaagagtcattaactgacatctcactaattctccttatcctttataaattcattttcgccataagcagctatttgtgatgtatctaattctctgaattgttctgcaatagatattggctttgttgctttattaaattccttaacatttgttcgttctaacaaataatcagcagaaacgttaaaataatcgcataatatttttaaactatcatatttaggcagttgacgaccatttttccattgactaattaatccttctgttatacctgtctctcttgacagtttatatgcagtaacgttattttcttgtaaaagttgtacaaataaatccttaaacatttgtgcaaacctccaaactttacaaatgttaagtaaaggtgttgactactttacaaatgtaatgtataataatattaacttaataaataaattaagcatataaaaacacgccagctgtaaaagcggctaaatatatattttttaatcgacaaattaattatacaatatttggttcgcttttgcaataggtttgtaaatttttttgaaaggagtgaaaaaaatggttaatgggattgcagcaatattattaagtgcaaatttgttgatattagcctgtttttgggtaatacctgaagggataactacatggactgctttatttttatttttcagaaaaaaacgcgcagaaagaaaatttaaagaaaaaaacacagaaaaggagaaataaagatggaaaatctagtcaaaattagacttttaaatttagggaaaaagcaagtggacctgttgaaagtaataaggtcaaaaggctattcgaatttacaaccgccgcaattgagttcttacatcaatggtgccaatactacgccacaggctcaagccgtaatgaaaatagtatatgagactttggagcagtgggaagctgatttatcagcctagaacatcacctaaaaaaataataccacgaattgagtaaaaaaacaaccactagatattgtggtggaagaaaatcagcctaggaggtgtaacaatgacgatcaatttaaagtttagagttttaaccgattggaacgacgaattgaaaacaattcttgatttagttgaaaaaataaaagaacgtcaccccaacgaccaactatttattgaagtgacgttcgaaaattaagcttttactatttcaatacgtatttagcaaagttgcaaaataaagtatagaaagaaggtgagcaaaatgccgagggagaaggcagcatatagggagaacttagaaagcgttttacagtttcttggcgataaatacggagatagacgacatcttttgtgtattaaggatgttcaggactatacagggacttgttatgattttgcaaaacgcacatttttgggtggtaaaaaatatatttcggctgagacgtttgcaaaaaacttgagtgaataaaaaaactaactattaaatgttaaatggtagttaaaaaaattaaatttgacctgatatagaaagaggtgattgaggatgtataattttttgattaaatataggctaaagaccggggcgcctgcaactaaatatataactgtaaaatctgtatcggcaaagctggcaaaacagcaatttaatgaaatgtatggttctgccagttttgaaatactgggagtatataaggaggtgagatcaattgtataactggattatacgaatatcgggagcggtggttggcgttgtattgttagttatggttaggtcgcttgagtggtatcccatattttacgcagctccgcttatgatgatacttttggcattttttaattgcgcagaggacacagctgaagaacaacccatagctgacgatgtgcgtaaggtcgtaatcaagccggataatcggcggtgggacttttcggacgcggagtgcagcagggattataaaaataacagtagcaaaagaatacataaaattgtaatgtgaggtgattattataaaaccaatagttatatgtggaaattcaaagtttgacaggcttgttatggactgcaattttgcggctatggcatatatggacaaggacatcaatgaacagtacagagaatttaggctggaggatataaaagtaaagtcctatggatatgatggaataggacagctgataactgaaaatgtagtttcgcccaaagaagatgaatgggattataataatacatattatcagtatgacacaagaggaaacaggatattaaagtcaaacagtgatgtgtatgaggaagcgtcggagatagaatataaatatgacaagaacaataggctgaaagaggaaagggagacgaatccgataaacagcatgtatgagaagataacatcatacgagtatgacaacaacggaaacctattgtttaaaggaatagaagagtatgacggagtaatagagggagaggaaagagaaatagagctgggaaaaggatattttggaaatgaggaatatgtaaggtattatagctataacggaagaaaccagctgataggaatgaaaagcgacaggacggaagcaatatataaatatgacccgataggaagaagagagagcaaaacggtaaacggaaagacaacgacccaccgctgggatggaagcaatatagtgagcgaagctggagagaatccaacggtatactatatgggaataaacctgatagcgcagaaagataatgcgggaataagttattgtcagtataatgcacacggagacataacaggtttagaaaacacaagaacaaagatgctgacgagatacgagtatgacgcgtttggaggcacaaaggaagtaccgggaacagtatacggacaaagagacaggattgatatacttaaggaaccgttattatgacccggaaacaggaaggttcacacaagaagacccggtaatggacggactgaactggtacgcatactgcggtaataatcttgtgaacttcgttgacccgtttggattggatagtatagaaaattattgtactaatgaagataaattaacattagaacagaaaaaagcaatgaactcagctataaatgcatatcatgatggagttttatcctatggagatatattagaaaatttagcacttaacggaggaactataagtgaattggcaaagggacctgctgtagtagcagaaatggtgggaagtgatttgaacataacggtttatgcaaatatagaatctatagaaattatggcgaccttggattctggagaaaaggtaaaaggaatttatacgcaagaaaactattcaatgatgttaaataaagatgacctaggtgatatagagtacttaaactcaggtggaattacatttaaggaaattctttgtaaaggcatagaaagttggtctggtagtgttaatggaataaatataaatgtaaatgttgtatatggaaaaagtaatacaaacaagacagttaaggccaatttcgtatatggaaatagggatcaaagttcatctccgggatatagttttaatatttattatcaaaatcgcattgatccaaacgatcgtgcattaatagatataataaacgtatgcgcacatgaaggcggaggacacagtgcattcaaaattaaggatgcttattttgacatagaaaatgtgggtattgttccaactgttatgaatgatgctttaattccggttacagatctagatagaatgatgttgattaatgcatacaatggtaattttaaacaaccactgtactacacaaactacccaaatcttttgaatatatatgcacctggatggataaaaaaataaaaaggaggagtaaatttgttaaaacatataaatgctattgtttttataataatgttaaatttaatagttttaccagtctattcgatgaataattatgaggagttttcaaaaaaaactgatacaatagtagaaaaaatagatataaactatactttaaaaaatgcttctgtagttagtattatgaatactgataaaaatggcgtgattttatttgctcaagattatgaaatcaataataaagataattcgaggtatatatatatagactataatggaaatattacagaatataaagattattatgattcctgtagtgattattataaaataccaaatatattttgtgaaggaattgccagaataaaaagtggaaataaacaaggatatataaataaagattatgattggattacagataaaaattattattatgcttcagacttttcaaatggctatggggtagtaaaagaagtgtccggaaaaagttatttaatagatattaatggaaaagtttgtctagcggcagatgacttctattttaccggtcaaaattctgacaatccgggaacagtgtttagaaatggatatgcggcatacttaaaaaataatgaaatattttatttggatacagatttaaattccgtaaaaattgatattggaaatgaatgtgattttaatgatggcgagtttatttttaatggtggcactttagtgcatatgtaccctgaaaaaataaatggagagtatacgcataaacaaatttatcgtatatttgggcatgatggcaaagaatcttatcgatatgaattacagcttcctgaattagaaccagttaatgatttttattatataaatgtattagcaaatggaaatgtcattttttcagaacctgaagattttagccgatataattctttagcaaatattaagcttgtttcaaatgaaggcaagaccttatcagaaacaaaacaattttatagatctagtagtaaattgttccgcagtataggagataagatatgtagtataggaaccttttatgatgaaaattttaataaattaggaagtataaatgtatatgatgaagaggcggtaaacaaggatggaagtgttgttgtcaatatagaatctgagtcaaacgttgaattaaatgaaatcatattaaaaagtttatatattgttagtaccgataaaattaatataatgaagaaaacaaatttagttaatccagataaaataaaagtgaatcagtctagcaagccgaaaaatattacagtatatataaacaataagcagttaaattttgatatatatccaataacggaaaaagatagaacattagttcctatgagagcaatatttgaagcattgggagcagaagtagaatgggaaaatgaaacccaaacggcaacagcaacaaaggatggaataacagtatcagtgacaattgacagtaataggatgcaaaaaaatggagaagaaataaaattggatgtacctgcaagattagtaggagacagcagaacattagtgccattgagagcaatatcagaagcattcggctgtcaggtagaatgggacgaagaattacaaagagtagatatttatacaaactaaaattgttacggagggcgtaattatttacgccctccggtaaccccaaaaaagctggacaagcgtaggaataaaaaactgaaacggtatattatatgctgataacactaatattttagatagatattctctaggatggtattataaaagattttatgaagattaaaaatttattagaaaggaagataaatttataaatggaaaatatatttaaaaaaatattggtattggtagttgttatatgttcatttttttgtagtaatgtgtttgcaagtgaacgggttataagaaatatgacaattgaggatattgtggggaaaaatattgagttagattggaaaaatgttattccaaaagaacagtttagtcctggaatgtatatttgttcaggtgtatatgactttggaactacatttcactattacgatatatcgaatgatatatcaaatgaaatatttatagattatgatggtaatataacattgaatccaataatttttcagggtggtatcgcaattataaaaacgacagataaaaatttagacgagcataaaacaaactataaatatggatgtataaatagtaaatatgaatggataattccaccaaaaataaaaagttatatagaaaaacaatatggagaagcgtttgcaatgacaatagaagacgcttttagagctgaaaagtcttatgaaacaagaagcgaaaatacagatttagtaataggaacaaatggatatggtcaatttccatatgatttgacagtaacaagtaattctgttttttcaccagaatcagatatgggtgatttaaaagaaaaaaggataggtgattatgtatcagcagcaatattgagaagcagaggacccaatatagtagaatatttattagatgtttataactaaagtattatataactaaaaaaataaaaaggatgtgtaaaaatgaaaagatcaataggatgtatgattgcaatatgtatattattatcaagtataacagtgaatgcacaaataagaccattttgggctgatggagattttaatataatatgtgatttaggaatagtaccaaaagaatatagagaaaaagatataaatgatttagtaacaagggcggaagttgttcatacactttcatgtcttgtttttgccgataattatctgattccgcaggataatcaagatggaatatatgaaaatcttggttggagattcgaggatattgaaagtaactctaaagattgtactatagcattttggggagcatctatgagaatatttaaaggagatatagaaaatggagtacataaggccaatcttcaagaattagcaacatgcagagatgcagtatttatgtccttaagagcgttatatagaaatctactttttaaagacgatgatgaagtagattattttaatttagcaaaagaatgtggaatgataaattatgggactgtaatatcgtcaacgtcagtagcaattgattttgaagagttagatgacaatatgacatgggaagaattctcaaaaatagtaagaactattttatatattccaaagactgtgacagcatatggaggatatattaatcaatattacatagatgattggaaaaaaggctatagagaataaaggttcctaataaaacaataaattaagataactttgaaaaataatgtttagtaagtaaattttgagggcgtaaattaatttacgccctccggtaaaccaaaaaaagttggacaagcatacgaataaaaaattgaaacggagtaaaaaacaccggaaagtttttgaatatataaaaattacttgatcatttgaaataaaaatccattaaataccttatttaaatagttaagaaatatatagctccatttcagttttttatgcgtaagtaaatttaggtaaaattatagaagataaaatattgttaaggcaacttattttgcctgatccgaatcaaataagtgaaaatgctttaagaaaagaacaggggttaggtgcaagagtatatcattctacactttaaaaaaggagttataaaatgaataaaaatataagtaaaataatagtttttattttaattacttctgtgttatttcaaagtatttcagtaaatacatatgcggaagagagaacagaaataaatactgatgaactaacagaacaattaatattgtatgaaaactatgaaaatgatagttttacaagagaagattgcattgttaatataatgaaaattataggtttgacggaagatgttattgaattaagtggaatatatttaggcagaccttttatagattatgatgctaaattaaatgcgtatgattataattatatttcttatgcgtggttaattggaatggttcagcttgaattaaaaaataatgctgcgtgggaattaagaccaaaagataaggctacaatacgagaagttttaacttggtccgtacgatgtttagaaaggtctggagaagggtgtgataaaaaacattgggattatatttttacagatgaagaattgtatgataaggcgtcaaagtataatttaattgacgaaaccgaaattcaatttgataggttaaatgatttaataaatgtagaaaagtacaaagaaataatttcaaatctattaaaatgtcaaattaatatacactatgcagataatgagtcatatcctgaagaatcgggatgcgatttaaaatatgatggcaaaacttatggagaatatataatattgaagaatggaggatttgaagttagaaaacgagaactttttttcagtataaatgaaacggcttatgataatccaatatttttataccgtttatacaatgatagaattttcatggactatcttactataaaatatagttttttttataatttaagtgaggaagaatttgataaaataatagaagacaattcaatagaaagatatgaaagaaaatttaaggatagaacaaatacatatgtgtcaataagagaattctgtgaagcaataggatataaagtagaatatgaggaaagtagcaatactataattttaacaaattaaatataacaaagaaaactttattatacgagaaagtttgttaggatgtaatttaattacatcctaacaaattgacaagttgaagagtgaagaacaagagtacgcataaaaaactgaaacggagtaaaaaacaccggaaagtttttgaatatataaaaataattaactatttaaaataaaaatccattaaatacttcctttttaaatagttaagaaatacatataactccgtttcagttttttatgcgtaacaggatgtaataagtgaatataacctaatgggactgccaaccaaacaaacggacaaaaacggaaatgaaacagtaaatacgtataatgtgtatggaagcgttctgacgagcaaggtgacaggagatgaagatataatcaatacatacagcaagaataatcttctgatatcaaccaaacaaggaaaggaagagataaaatacacctatgacgactatggctatatgaaaacagaaagccaatggaatattcagaatacatatagttatgacgtaaacggaaacaggaaaaattatacacaaaaagcaggaacaaatacaatactgacagggtcatatacatatgacatattgggctttcggatattcaaccgttactgttgttccgtcaggattccttgtggatatctgtctgcccaaattgtcatattccgcatatgtcacatttccttttccgtccgttgtgcttactgctcttcccagctcatcatacgtataactggtggttacacctgcaaccgttttcgtcagcggcagcgacttattcagatacgttatattctgctccgtatactccgttccggtcttatagcttctgaccgtacttgggttggctgagttattgtcatcataggaatatgtctcttttgcaaccaaatttccgttctcataggtgagactctgagccggaacttttgaatccgccgacagcactgtttcctctttaaccgttgtgcttccgtctcttttgtattcctttgtcagctgagtatgatacacatcatcgtatgtatacgaggtcatatgctctgtattggttttatctccgtttgcatatgcgtcccagctcttcaccaggtctctgtattcattatactccgaaatcgttgtactttcaatactattttgttcattatcatatattatgtttgttactgtttccgggtatgttcttttgtagtatcttactgtttctccgccataaattgttttggacagatataccgaattctctccgttcatataatatacttcgtctgattcttttaacgtaaactttccactagcattactgcttttataactgtaatacttgtcattaggataatatgaagatgtcgattcataacatggtgcataattatgctttgttattacaccgtcagatgttgtttcggttgttgaataagcgttgttatacataaaagaccctgaataatcatatgcaataacattttcttctatcccgttaacaatatcataacgtttgataagtcttgctgattcctgtcttaagctattataactatacatagtttttgaatattcataatgtgttgacgcacctgttggatgtataacatcggtcaaaatataaaaatttctatttataaaatttgttacgctatatatttcatcttcgttatttccttcctgatatttaaatgttgtttgtaatccctcctgatttgtgtaactatccagtatttgggcatatgtgtccatattggctgtattcatagttgacctaatattatatttttgagtggttccctctatttcggaaccatcgcttcctaacacttttactgttatttcttgaatataattttcttttgtttttctctctacaattacctgtctgccgcatgtatctgtaatcacacatttattatattcctgtcccagctttgtaaaatcatcatttatttcatcaccgtttgtataatatctataatatatagcgtcaccaaaacgattttgggttttcataactttgccgtctgcatcgaagtattctattcttccatctttgtaatacaatttaaaggcagagacaactcccccgtcagaatcaatatattctgtatttttttcgaactttaaatctgcatagctatatcttccatccaatgttaactcaattacagaagaatctctgagacttttgtatgagatcgtatgcgtactgccgtctgaagcagtcaatatcgaatctgttctatatgacgaaccatactttctgtttattaggtttatagagctaataccgttaaaactccatcctgccgcaaagtttactaatggagtttcatatttataccaccctacagttgtcgctggaaggctgcctatatctgtgggagatgagtttgcagtattatagcttgcgcttaagttcaaatcaagcccatttttacccggcaatgacagtccgcttaagttatatcccaatgctcctgaggattcattaaaggtttcattgttgtttctgtcaaacgtaaacggtgcgtcagggtatttagatgtatcatatattgtttcatcttcatcttccataggcatcacttcacttaagcaagacatgattgaactatattccaaaaactgttcttctgtgagtttagtttctatctcctcataactcatatcagcatatgaagctgtgccggctgttccaagcatagcggataatgctgccgtctgcaaaactttttcagatgttaatccgcttatgaaaagacttctatattcagcattttcctggatttttaaagctggaacagaatatttgaaatttgcaaatgatttaagctcatcaaacacttgttctttactttcgaagttattgagcattatcttatattcacttgcagttataccggcattctgaataagcacaccgaattcaaaagtgttttgtatgtcaaagccttcattttcacaatctgtgaacacatcgtcacgtattccgtattgtttctgtgcttccgctttctcatcatcgctcagttcagaatattttaccccgttatttattgtttcttctagatttatttcaggcataggagtttctgttgcttcaggtataactgttgtttcaggctcctctgattcttctgattcaggcaatgcaccttcttcctgttccacagacggcgtttcaacagtttcctgttccgatgctgttgattcatcatttttgtcttctgtttccgcgttattatctaacggttcttctttagtatcttcgtctttttcatcagcattttcttctattaaattattctctgtttcttcatttattacttgttcttctgatactgatgattcattgtttttttcaacatcagcaaacaccattggtattgatgtaaacagcattgatattattattaattccgatattattctttttagtctactcatttgttttctccctcctctgtattttctacgcttttggcggtcataagcgatttaacttttggctcctctccgattcctccatagatattctcaggcacgtttcggtatagtcccaaagatgaacgttcatttgtgccaaatgtgtatacgtttccatccacatctaccgctacagtatatcctcgtcctgctgccgctttttttattgccgggattcccaaaacttgtcccggaacacggttattacccagcgctctgccaagctgtccgtcattttggtatccccatgtccataacgttccgtcattttttattgccagtgcgtggttatatcctgctgctacttctcttacatttgtaagtccgcggattcttgtcggttttgacatattttgtttatgtccaagccccagctgtcctgcactgtttcttccccaggtatacacatttccggcctctgttactccaacacaaaaatccgggcctgccgatacttgcttaaatactccccagtcttcctcatcctgcggattttctaatctggtcggcgtatatactgtgtctgtatggccaagtcccaactgtccatattcatttgctccccatacataagtatctctttcatattccccatcctcagttgttgctaccgcaaaactatctcctgctgaaacagtctctatatctttctgcaaaattacaaccggttcactttcactaacactgctttctcctgttccaagctgacccaagtaatttctgcctattcctacaagctgcttttcaaatatagcattatatccttcaaatccaatacaatgtcttctaactactaaagtaaagtcatttcctgccgctattttgagcggttcgttctcaagataatctgacgcgttataattatctccctcttctgtataaccgcttaattctataactctgctgttttctattacgttcttcggcaagaactttccaagttggttgttagaattactcccccatccttcaacaacttccgctgaaatgataacattatgatttttacctcttgctatctcgtcagcactgctatatttatcactctttttcggatatccgtatacttcctctccgctcttgcctgttccaaaccagcctcttccccacacaaacaaatttctgtcactattaaccgccaatacctgatcctgattcgcatctactttttcaatattttttagtcctccgattctaacaggctccagtgcagtatttgtttccatatatttttggtcatatgtggaaattccccactgccataaattattgtcactgtccataccaatacataattcatcagcatcaaactcttttacaccggtgactgacataacttttttaggaagataatttttactccatcccatataaccgcactgatacaaatatccgccgttaaggaagcttgtcagattacctcctgcctttatactttctgtgccgactaaattatttgactgtacaggcgctatggcattttcaactgtcaattcaagtcccaactgtccataactgttacttccccagctatacacagttccattttcttttactgcaacagcatgatttgcacctgccgttacctttgtcacaccgtccataacatatgtgtatgtttttttcatactttctgttgaattgattcccagttgtcccgatgtgttctttccgcacgaatacaattttctctcactgtctattatataactctgataatctcctgcggctatggctgacgctccttcatacacttttgcaaaacgtctcttcgtacttgttgaattgttgccgagctggccataagtattatttccgctcacccaaaccgttgcgtctctctttaagataattgtatgcgcttcacctgcgtcaacatcaaccacgttttctgccagcaattcaggcgtcagaacattttccatacttccgtttcctagctggctgtttgcattctgtccccagccataaagattatatttgtccgttattacgtaactcatatttcccgatgcggctacgctcattaccgcctcgcccttttctgtccacggcgtattgactgccacaaaatcatcagactccgcagtgcttccgtttcctaactgaccataatcattgttgcccttagacatcaataccccgtctttatacacaagtatatgtctttgtcccactgctacgttatttctgtttgtatatattttttgattactgtatatgtatgttatttccagtcttccctgcattaccccatcatgcatactatcttttattgtatatatcctttctcctattatcgctgttcttcctgccggcaaatccatttccggcaatgtatccggcagcaccacccatatatctttatccggcatatatgcgtatctcaccttgctgccactgtctgagccataattaataaagattaaaaattcgcccagtttcatcagtttaccttcttgattcgaaacagaaccgtaactatagcttgggcgtatctgtcgctctgaccatacattattacttgtatcatatacgtatgtataattgccatctccactgtattttgcagtgcagtatattttgtttcctacagcaactcccgtatacgatccactattaggaaagtattcaccacgtgtccacgtttgatttactgtatcatatatatatgtatctcttgattttacactatgattaacatcatcatagccaccaaaacaatatatattatcacctatagacaccgcttcaccatcaacaaatccaaacggaatctcttgtcccacagaccaagtaccggtctcagtgtcaaatatatctactttatcagttacttcgtttccaataataccgccgactaaatatatctttcctccattttcaactgctgaatattctgatctcaatgaaggcataaccggcgcgcttgtccagctatttgctgcagtatcatatatttgagtagaatcccagccaaaacaatataccttgtttccacactccaccatgctcacattttctcccaccgctgtatcagaatatctactcctaatcaccattgggtcatctgagaaatattctgcaatctgatctgcataattctcttccgccgaaccaacaaatacaaaaccacagcatagcataactgctgcaagaattgacgctgtcactttttttaacataacttttcctccttattttttatttatttttatatattttatttgctatcgtgatatatacactaccacacagcacaaacatacactaaataccgtataggtaaaatttaccataacgcatttcacttgtcaacaagattttgcatattttttatttttttaggaaattaattacaagtaaattttagttatatacaataacaaaacaacatatcgtggcaattaaaacaacgatataatacaaaaaatcataagtgaatatctgttgatttagataaaaatttaattgaacagtttgaactaaaatttaaaggtgataatattatttctaaagctgaatttattcggagatcaataaaaaagtatttagatgataagtgaataaaaaagatggtaggcactttttgtgtctgccatctttctgtcaataccattaaaacccatcttttatattatttaattttctaatattattaacaatagaattactacgcaatcaaaacacctattaccatagcagcgatacccaaaatacttgcaattgtaataccaataattcatttttgacttgcatccattttttcaattaaatcatctttaagattgtcaataacatcattttgtttaaacatcatatcttcaattgccggttaagtttgcgcagttctattatttcctgctcttctgcagaccggttatctttttcgtgaaaaaagccgctagctgctgactgcttcagccatttatccagcaatgaagtggctatatcatatttacggcagatatcacattttcgttttccatcatggtatagctgaactaactgttgtttgaattcatccgtataggatcggggctttcttcttttggtcatcatagtttctccttttatattttctattttacatgaccttatttttttatccagttttttgtagcctatccaaacatcttatattattacgtttagcaggatttgaagatatagacttagacaaatattttagacttgtagtaaataaagatggtgctgattggacctttgtatgtccaagtaattatgaaaatatgtccaacaaattaaaacgtatccaaagattttacaaagacggattttctatcataccattagcgttaaacgaaatcggttatatggttggtattgatataccaagacgttatcgccgccatattgatatgatgtaatggtgtgtccgcctggatgcgttgaattactctgcaggacaagttaaaacaatgggttgttgcaatttttgcaacaaacaggcctcaccatccacataagcgcatggataaaaaagtatcacgaatgtaagaaaggtgaaaaatgccaatatacaaaatgaaggagtcgaaaaacggaaaacaaaaaaggaaatggacttttacacggcggatgaatataaactatacaccaaatctgcacttgaacacgctgaaacttgttcaaatttgaatggctggaatttttatgtgttcttctatcgcattttataccggacttaaaaaaggcaaaattcacgctttaaaattgactgatattgacggaaaatatctgaacgtaacacgcagcatatcgcaaaaactaagggtcgaaaacagagaaactgctcctaagaataaaagctcgattcgcacacttcaacttcctataccattaattaaaatcttagaagagcataaaaaacgctggtctgagtacaaaggattcaacgacaatttcaggatttgcgggagcacacgtccgctcagagataccagcttagcaaaaatgaacgaacagcttgccaaatcagcaggactaaaaaccataaggattcatgatttccggcacccttatgtcaagtccacgacaaaaaaatatggagatttttttcaacttctaaaagccagttaagaaccgcaattcctaactggctttatcaatataccctgagctgttatgccaggtcattttttatttttagcacgatctcaaccctcttgttagggtaaataaagattttttcaatcagcatatcaacaagttcagaagtcagtcctttgttttcaaccaaagactgtaatacatctttttgctggtgctgacgttctttttcctgttgttcagcctccagtcgtgtcattacaacagcctttgtattctctacttcaagcaatcgctgttcaataagtgctttctgttctttatagaggttaacatcaatttgctttattacaagcgcctcatacagtttacgcttttcttcctgcagctcaaagatctgattatcaaattcagctcgtctcactgcaaccttatcaacaggttttaattcattcggcccatcaatccccaaagatacttcaaactgtttacaaagaaattcatatactatggattccaattcgctttcccggatcgtcataccatagcaaggctgtgaagaatccatataggaaaacctgcagcgataaatagtctcattggaacggtgcatagcatgtttgcaggagccgcaaaatacctttcctcgaaggggataactatgctgttttcgttttggaattttaaaccgcttaatggaagcattagctttctcgaaaagttctttgctaaccaatggggtgtgatgatttggaatcttgatccattcgctttcatcttttgtccgcatacggtttccgccgatttctgttacagtcttttttcctatcacataagtgccgatataacgttcgtctgctaacagtctcaaaatggttgaattagaccatacaccatttgtccttgatacatcgtgatacttttggcctttgagagccttgtattcgcccggtgtaggaattgcctgactatgaagctctctggcaatctgcgcactgttcataccggacgcagcatattcaaaaatcatctgaataacgcaggaggtctctggatcagggaccattcggttattgtcacctttacaatatccatacgggcagatcttactttgatattcaccgcggcgcatcttcatatactttgcggttttggtcttaacagacatatcccggctgtaatattcactgataaggtatttgaaggcaacctccataccaccggtatcgcctttgagctttttcgtatcaaaatcatcactcacagaaataaaacgggtatgaaagatcgggaatacccgttctataaagtaacctgtctctagactgttgcgcccaaatcttgaaaaatcttcttgtgtcaagtagggactaaaaaaattttgagaatttacaagccgttcataggtggacaaccacccatgaacggcttgagttttctctacgctcttgtgccgttctttgtgcgacgcttcttatacgccgccgcaaatgcctccaacatcggagtgaccggaagctcgttgtcaggcttggacagatactcgaaccggatgccgttctcccggaactttcgctcaaacctcatgaaagaggaagtgtcccggctgattcgcgaggtgtcgcgggtgaggatcgtaccgatgtcctgacgcttggcttcgttcagcaggaagttcatgataccttccgtatggacggcggagatgccgtctgccgccacagcagcagccacctcatagcctttgtccttcgcatagcgttccagctcttcccactggtctgctgccgcaagctgatccgcacaggcaacgcggatataaagaaatactttcatttggcttctccttctgatgtagtgaggaagtccttgaacttccagacgatttctatgttgtcaagatcgtaaatgtagaccgcagaaatgaatgcgtgggtcagctcataggtcagagctttgcagtcggcgtactgttcgcagaccgcatccagcttttcatctgaacaggcggtctcggagtcaagctccttcatccgctcgtgaccgcgctggattgctccatcgttttcagcaatcttcacatccgctgccgccttctgctgaatgtacgcctccttcgtgatgcttccggctgcatacttctcgtagagcctcagcttggacgccttgttctgctcgttctgcttttgcagagtgcggattttatcagcacattccttgatggcagatttccgcagatcaccgacttcgcggttctgtattgcttccttctgtgccaaagcaagaaactgagtaagggcatggaagacaaccttctcaatatccatttccggaaagctcctgccaaccggacagtctgtgtttccgttgttgaccgagtgaatgcactggaagtaccgaatgccagccttgttctttcggcgtgtcatagcacgtttacagttaccgcagcggacgagtcccttgagcggatagtcatgctgcttgcgcgtgggattccgtcctccgcctcgaatgaccttctgagcaagctcaaagtcttccttgctgataatagcttcatgcgttccttctacgataatcggctcattgacaacacgcttttttgagccgacaccgcaggacttcattttgcggctgaccagtgttccggtgtaaacaaggtttttgaggatgttatagaccatcacggtttcccaactgattttctcgctcatgttactgaacttcttcttgtcgggatgcttgctcttgaagtattgccccggcgtcgggatgccgtcatcattcaggctgcgggcgatctgagaggtgttgctgccttccagcgcctcgcggaaaatacgacggatcacatcagccgcctccgggtctacggcaagtttgttccgaatggtgggatgcaggacgtagccgtatggggcgtagccaccgacatacttgccctgcttcatcatctggatttttgccgatgtggtctttacggaaaggtctttgctgtatgcggcgtagatgatgctgcgcataaccacttccaggccgcccgttgtgcctttgtaatcgtcactgtcatagccgtcgttgatggaaataaagcggacgcccatgaatggaaaagtgcattccagatagtttcccgtttcaatgtagtcacgagaaaagcgggaaaagtctttgacgcagatcagattgatttcgccgcgcttgaccttctccatcatctgcgtgaactgaggacggtgaaagttcgtgccggtataaccgtcatccgcaaactcagaccgctgacagtgagacaactccggatgattgtcgagaaagcgattgatgagcatacgctggttgccgatgctgtcactttccgccttgctgccataaccggtatcttcatcagccattgagaggcggatgtagatgccgatgttgtattccttgctcatttacatcgcctcctgcacttccttgatactctgaatggtcagagcgtaaatatcgccgtatttcatgaccagctcgattgagccgtcctcatggactttcacaagctctacggactcgtcaaccaactcctgagagagcttttctgcaccgctgacggatttcatcagcgtgagccacttgttgtcctcggacattgcctcggcaaactttaccttctgctgaaccgcttcatccaaccgccgtgaaagatcgacatactgctcatcgtaggctttcttggcaaaggcgtattcctcttcatcgagaacgccttccgtgaagtcctcatagagacgggtacgcttcttggaaataccgctgagtttcagattcaggcttgtaatgagcgcattctgctgatttcggatgctgcgttcaccttcgctgtttctcagtttggcaagcagcttgtcgtaattgagagccgccttgacttgaagctggatcgccgcaagcacatcggcttcgagtttgtcctgccgcgtatagtgtggcgtacagagattgccgcgcttgacggatgagctgcactcatagaaggcgtaccatgcgccgtccttacgcttgtcaacgcgctttcgatggaaatagagtttcctgccgcaatctgcacagatgattttgtcttcaaagagattgatcagtgtagcacggattttctccgtgcgctccatcttctcaatccttgtccttgcagcagcgtcgcgcagctcttgtaccttttggaagtcctcgcgggaaataatcgcctcgtgagtattgggaaaaacaatccattcctcgcggtcgatatgctgattcttgacgcccttatagatggcgttcagcgtccgtccgagaacggtatctccgacgtaatggggattatccagaatggtagtcagtgaagacttgttccaaatcttctttgccgtagcattgcctgtgcggacgccgacctgatacttctgaaactccggattgggcgcgttcattgcatcaagccggtctgcaatcgcaggaagggacagcccttcaatcttccattggaaaatcttccggacaatcggtgcggtttcctcatcgaagaccatattgctgtgttcttcatcccagcgataaccatacgggagattgcgcttcttgaactctccactttccatctgcgccttgagcgcagtagaaaccttgcgggagatgtccttcgagtagagggtgttgatcatgttttgcagagggatgatgaggctttcgccggagctgtccgtatcaaagttgtcgtagttttccttgatggcgataaaccgaagcccgatctgcggaaagacccgttccagataggttcctgcctcgatgtagtctcgcccgaaccggctgagatcacgaaccacaaggcacttgatcctgccggtgcggatgtcgttcatcagacggttgaactccggtctatcaaaaaccgtacccgttcgtccattgtccacataggtatctatcagattcaggtagggacgctctgcaatgtaggacttgcaaatctcaatctgatttgcgatgacatccaccttttcggacttgccgctgttttcaacggaaagacgggcatagatggctgttgcgaagacctcggaggaggcagattcgataaccggatcttcgactgcaatttgctttctgctttttcttgccacttgctcatccctcctttatacggcaatgtccagctcgtcggcataaccgagaacgtattcaagtgtctgctggtattcgtccttgtacttgaagacaatttcgattgcatggttttcgtgaatcaggatgcggtcaaccaacgacatcagcacacggcggttcagctcttcgacgttttcatactgcttaaaaagcgttacccagttccgttcagtcgtgccggttgtcaccgtctgcttcatttcttttttgacccgcagaagcgcgtcctgcttgttctcaatggttttggtgtagctgttgcggaactcgaagtattccgatttatcaatgacgccgccgatgaagttctcgtaaagccccagcttgagcttttggtaccgttcaatctcttcctcgattttggcgatctgagcttcgtaattgaaagccttacggctctgagatggaagccgttctatcatcgcaagcgcgtgttccagattgatgacaagctcaatctggtcatgaatggcacggaagaccttctcttcaacctcttttgcggcgatgctatgcgggctgcacgtccggctgtgcttattggtggagcagacgtagtagatatactttttcgtcttcgacgggacggtcttgcggatcattggctgctgacagtctccgcagaacaagaagccggaaaacaggtgtgcttcgttttgatcgggtgagcagcgcatatcccgctgcatcatgaccttgactgccatgaagtcctcgtaggacacaagagcttcatgcgcgttctcaaccttgacccactcggattcatccttgctcttcacgacgcggactttgtagttgggagtgccgcgcttgccttgagccagaacgccgatataaacctcgttggtgagaatacgctggacggctttgtacgtccattttgcggtatcgccggttttgaagacggtatcgaacttcacaccggcggaatgcttgtattccatcggggacaggacgcccatctggttcagacgctttgcaatgcgcccaatggagaacccgtccttgtacatggagaagatcatctgcacatattcgctgaccgcttcatccacgatgagctggtttttgttctccggcgatttcatgtagccgtaaggcgcgaacgagccgacgaactcaccacttttctgtttgacttccaaactgcttcggattttcatggagatgtccttgcagtaagaatcgttaatcaggtttttgaacgggataacaaaggagtcggactgcggatcaccggtcagactgtcatacgcatcattgattgcgatgaagcgaatgccaagctgcgggaaaatcttttcaatgtagcgcccgccgtcgatgtagtttcttgagaagcggctgagatccttgaccacgatgcagtcaagcgcacccttgcggattgcctcttccagctttttgaactgaggacgattgaaggaaacgccgctgtaaccgtcatccacaaacggctcacagacaagctccaaatcctcataccttgcgatatagtcctcgcagatggctctctggctggcgatggagttgctttctactttgtctccatcttcacgggacagacggcagtagatcgccgtgcggtaaaccttgtctggcataaaaataacctccgtttttctgtttggtgtggtacatcaaatcagaaagacgaaggcttgcttcaactcttatgaagaggaacacgaaaacgccacatgaccatcagggcaagcagcttaatccgtattcttcttttttgaccgatttcattataccacaggctcaatcgcttgtccatagaaccgggtgaaaagattcagactgttcataaatcagagacctctcagatagtgttccagacaatcttccattgtcgtgtccgtcgcggcgaagctgatcttcaccacagttttcccgtccagataacaatagggatttctgatctgcttgatgaactccctcagcctgtcctctcgcggtgccgcaggatcaagccggatgctgcttctctgaacgagtgtgcttcggtcaaccgttttcggactgacgcttttcattgtttcaatgcccatcatattctaagcacctcctgtttcgtgaaatattcaggacaaaaggatatggcagagcatcttgtgaagataccctgccacatagttttcatcctgaaactatatagtaagtttcttttgggtttgtttcattgtccggcatatttgcagctcgcgcccctgccagaagaactttgcagttccgggaatgctgcggactaccaatggtcaatcggtatcatgggactctcacccctccgaggatcgctccgagccgcccattcaaagaaaagacggaagtatcattatacccggcatctgcatcgtcgcaagcagccgcaccacacgactgttatagctctccggaggtcgctcactccctttcgggaggtcttggcgtcggaagctgtgttgcttcgcagaagcggaaagatccgcagcactgaactattcagttttcaaggagcagtgaagtggtctgattgaccctttcactttacaacggacatctttttgccgtttgttgagtaccgctcaaaaaattttttgaaattttttctgcaccgctgctttgaggtcaaatgcagctctgatgccaatgcctttcctccgggcaaactctcgaagagtcagtccttcacgggtcatcgcaagatacaattcgcgctgcttctcggtcagaatggaaagaagctccttctctttgagggcggtgatcagttcctccatgcagtcgcgggagtctgccagccatgcagcggacttcacatcgtcctccggcatagcgtcaagggacagcacggtatcagaaattttctctgcgccgtcctcatcctcagaggtgttgtcagagccatacgagcgtctgatccgcttttcctctgcgcgaaggattctcataaccttgcggtcaacctcggaaacttcgccggttcgtttcacgcgcaccatgcacttgtcgtcctccgtagtccataggtcgtaatcgaacgcgataggggtcttagggattttcattgttcatcctttccgctgcgcgggagcagcgggaagggtgaagacagaaaaagagccgcatgacggtgaggtttgaatcccatgccgataaaacagagcaattaaactctgtctcatgcggcattaggatgacttcacctatcaggcggctccacagctcagctatgacatatattttattttagaacagaggcttgtcctccggttcttacttggtacgcggtcgcagtcttctcatattcagcacatcaaagactgtgatccgcccgcatttcttgcacttggattctacatgacctctcgtgtcttcgtagacagcaatggcattatgctgacaatagggacatttcaggtatcggggcttctgctgggaaatggcaactcttgccctgcggattttttcgatcagctccggcgtcggttcctgaacccgaatggatgctctcttcattaccacacctccaatgggtcaacatactcactgaatggacgatctaccatgtagccgagctgacgaaggcggatagacgccgttgtcttggagacaccgaacaaccggcagaaaaggcgcagcgttaagtgatcaccatacgaatacctcccctcgtaattgatcagcggcgtttctgcaaaccgacgcattgccaggtcaacctctttttgaggaagcaggatcgccgcgcccaagacatttgcttgccactcgttccagtcctcgcgggttttcagctctcgcggcgtataggctgtccgtgcggaatatttcatttcgcaggaagcctttacctcttccgattccagttggaagagaatctgatgggcgcactcgtgggcaagggtaaatctgcgcttggcgcagagccgctgcacgttgccggatcgaatgaagctctcgtccaagatgacctgattacgcttcaaagccagtgtgcgcgtaataccaagttccgtgatcttgtactcagtgtcggcataggcagtgacaccgcagatgcttccgtccggcgagagacgggcgaatgatacgcgaagaccgagatagttctttgcaaactgatcaatgggtgttggcaaagctgatcggtcgggcttgtccgcctcatccccgaaaaagaaccggttgaagtccttcgttgttgaggctgcaatttcttcaagttggcgctgggataaaatcatgagcagttgtcctcctttgcttcgacgaaccacttgtctccttcgtggaaaagaaatgactcctttccgcgaatctgaactgtgtaacggatgcctccgcccccaacctttttggatgtggcgcggcatttgtatagaatctggtcgatttgaaagattacaccgttgtcccaccagataaggcgagggaggattgccccctccttgtccacatccagcgtaaccgggacgtatgcttttctgtactgtgtagccatttctgtttttctcactcctgttccctcataccggtgtatgccggtacggatgatcttcggcagcataaatgcctgtccatttgaactgctcaaaagatgtaactttttcgtgtacaactactcatgccccttgacaggatgagcaattcaggatatactatgagtagttggattgctcagtcattattatacgcacttcaagtgcctttgtcaatagacttgcgcaatttgatgtcgcaaactttttgtgaacaggagtgattaccaaaatgacgtttggagagaaattcaaggctgaacgggagaagcggaagctgacccagcaggaagtagccgatgcactggggatcaacaggcgtatgattacccggtacgagaacggcatttcctttccccgtaccaaggacgcttacagaaaaatcgcggaatacttcaaggtggatgtgaactatctgctgaccgaggacgaagagtttgtggttcaggcatccgagcagtacggctcccgtggcatgaaacaggcaaaggacctgattgaagggatgtccggcttgtttgcgggcggtacgctgtctgagcaggacaaggatgcggtgatgaaggcgttgcaggatatatattgggaatccaaagcccggaatgttgagaaatacacgccgaagaaatacaagaagaccggtacggacgcagaggaataactgtctgcgtctcggtttcttgacggatttactttgactgttttcaacatgaaaggggtgaaggtcccgtgataattcgctccgaggaaatatacaaaaaggcgaacagcattgtcaaaagctgtggaacaagagataccttgaagattgcccgtgagctgggcattcatctccattttcttgacaatctgaacgatctgctcggaatgtacacctaccgccataaagagcggcatattcttctgaactccaacatggagtatctgatcatgcaaatggtttgcggtcacgagatcgggcatgatacctttcaccgtgatcttgccaaaggaaacgaaccgctcccggagttcgtgctgttcgatatgcgcacaaaacacgaatatgaggcgaatgcgtttgcctcacacctgatcattgacgatgatgagctgattgacctgatgaagcaggactacgatgtggtgcagctctcggctgcaatgggaacaaacatcaacctgatgctgatcaagctcaacgaactgaaccgcatgggctggcagctcaacttgccttatgtaccgcactctgacttcctgaaaaatgtcagaccggaggggtgaatgaggatgaaggatagtaattagatgaacaacgacgactataaagaagcccttttctatgccgcttccatctttaacgaacgcttgggggcagagttcagtgaggacaaccttgtactgcgctgctttcagacggaaaaccagcaggaagtctttgagcagttctgcaagcagtatttccctgaccggctggaagaccgatatacagaggacggctattttgactttcacgcctctgcattcgtcggcacaggagacggcgcggacggaatccttctgcgcacagacatagcgcgtcatccggcagagttgaagcacattcttctgcatgagctggcgcatatcttctgcacccgcaacgagattgacggagataatttctttgagcgatactgcatggacgataccatcagccgcgaagaggacggaaccattaacgccggttatgcggtctggcgggaactgattgcggagctgattgcatttgagctggatgacaactgcgatgtagttccgcttcgacgcaagaaagacctactcagctattacgaaggagaactcctgaccggcaacggaaaaatgggcgtcagcatgattctctgtgaggcaatgaccagttctgagggcgaagcgtctatgacatgggacgctgccaaaagcaagtttacgcggttcaagccctttgatgatccgctgtacagggacttgctggaactggtttttacacacgttagagaatactttatcgtgatcgaccgcgactttatctatgaaattggagttttgtatctgagcattgccgcacaagcgatgattgcgtccctaaagaacagatttcaggaagaataggcagaccgaaagagagaaaggacgggcaacgatatgaaatataagctgtttcgctcccccggtaatctggacaaggcagtccggaagcacgaactggttgccgtggagaccggcaagaacattgatgatgtggcagaagcgcttatccgtgatgttcgggatgatcttgcggaaatgccggagtatgcgcactgtgaaaccgctgcgtatgcaccggaaccaattcaggagcatcgccgcgtaagacgttatcagtatgagatgatgggtgttgtttacccgcagtatgcggagaagaacatcctgattgattatggcgtgattgaagaggcggagtaatgtcaaagagatatgccagacaactacatagtgcagatggtttgattgccgccgtcgaacaatacggctttctgcccttctttcggaacgagattcacggcttctccatcgaggaactttgcccacctgagttatggtttgcggatgatgtagatggtccgtgggaatggaaaggaccggctgcgcggagcggcaaatgtctttacggcaaacttttcaacaagaaggctggatttgtgagtcgggagtggattccggactttgcgaacttccggcgtgacggctatgactttgacgcccgttgggatgacggcttggcgtcctacaaggacaaggagctttatgaagccatagccggtgaaggcaggatgctttccaaacggctgaaagaggctctgaactaccgcaagggcggcaacaccggttttgagacgtgcatcacgcggctgcaaatgcagagctatgtctgcatcgcggatttcgtctatatgcaggacagatacggaagaccttatggctggggtgtcgcagagtatgcgacgccggaagaacttttcgggtacgaccttatcacatctgcctatcagcgagacccgcaggaatccaaagaacgcattctaaaacatctgcaatcacgtctgcctaacgcgaccgaaatgcagcttgagaaaatcataaaggggtaacgcaatggacgatattatctttgagaaggattaccgggaaaccgagtctgccgaatacgataaatggtgcgatgaggtgtttgaccgcgcagttaattgtggtatgctgaaagcgtactccgaagcaatggacaagataccaaagatcattgtaccggaggacaagaagaactacgagtatcttctggaacgctgtgatgcgtttgtcaagcaacaccgcgggtatatcaagggaatcgtggactatcatcgttggcacgcggaaatcaatatgtttcttccgtttgcggagttcgatgactcagaagaccttgcatttttgaaagaaattgcagaaaaatcgcaaaccgtctgcttctccccggacgaagaaggtggcattcgcgttcatatttttatcaactactttgaagaattgatgtcagccgaacacaagtcatacatcgaatacgatgctattatgcaggacaagaaactatctgagttacttggcataccggagctttctgacgaggaaaaagaactcgccctgaaaatgaagggcatacttgaccgcattgatgatgaaacaaggattgaccgtaccacggcttttcgagccgtgcttgataagatgacaaaagagccggaagaaaactggtcgcttcattatatggcaacattgctggaagctctgctatacttcatgctgaatgaaggaaatgaaaagattgatgaggaagaacacaatgagtaagaaacttgtagcgtatttttctgcgtccggcgtgaccgcaaaggttgccgagacgctggcagaggcaatcggcgcggacatctttgagattgagccgaaagtgccttatacggaagccgatctgaactggatggacaagaaagcccgcagcacgattgagatgaacgatcctgtttcccgtccagagattgccataaagcgggacaacatgaaggactacgacacaatttttgtgggcttcccgatctggtggtacgttgcgccgacgattatcaatacgttccttgagagctatgatatgactggcaagacgatcatcccgtttgcaacctccggaggaagcgacattggcaagacgaacgaacgccttgcgccgagctgcaaaggcgcaaagctgatggacggcaaggttttcaagggctgcgtcgggcatcaggagcttgcggcgtgggttgaaggacttggactttaaggggcagacaaatcggaagttgtggaggtgctttatgaacgagagagaaaaaattatccgattatggtttgatatgtggattaagaaagcagatttaggaattgacaatatttttacagatgatgttgtatatactgagagttggagtcctaaatatgaaaaccgcaaaacggtaaagcactggtttgacgaatggaatacacgcggaagtgttcttgtctgggagattaagcaattttttcatcaaggcaatcaaacaatcgtggagtggtattttaaaaacaaaatgaataatggaaatgttgaagaatttgacggaatatctttaattgtatggacacaggataacaaaataaaatcattaaaagagtttggttgcaatcttcataattacaatccatatcgagatagtgatattcccgtatttcgagaagaaaaagcaaattggttttgagaggactataaattccagtttaacgaacaggagatgatgatcgcatgaaaatcctacatgaactttcttggctatgggaaacgctgggcattgcgcttgttgctgcggctgtctgcatggcttgcgctgcgctgattggcaaggcagcgaagaagaagctcgacaaaaaggtgttggcggtcgtaggggcagcggcatttgtgggcgcgattctggcggtcattctgatcgcccggacaccgatgccgctttgataggacggaggattgaatcatgccgcttcaaatcgtcagaaatgacatcacaaaaatgaaggtggacgccatcgtcaacgctgccaacgagtcgctgctgggtggcggcggtgtggacggctacattcatcgcgctgcaggaccagaactgctggcagaatgtgaaacgctccacggctgcaaaaccgggagcgcaaaaatcacgaagggctacaagctgccctgcaaatatgtcattcacgcagtcggtccgcgctggtatgacggtcggcacggtgagtgcgaactgctgatctcctgctatcggacatcgctcatgctggcgaaggaatacggatgcgaatcgattgcgttcccgctgatttcctccggcattttcggctatccaaaggatcaagccctcaaggttgcgattgacaccatcagcagtttccttcttgaaaacgaaatgacggtgtacatcgttattttcgaccgcaaagcctatcagatcagcggcaagctgtttgccgacattgcagcgtacatagacgaccgctatgtggatgagcataccgatcctcgttctgagcggctgcgcaggatgaacgccttccggatggaagaacccatgccttgcgaggcatccgtttgtgaagaggcaatcgaacagctcatgcctcccgtctttgcggcggctgcccccaaaaaggcggcaacccttgatgacgcgctgggacagattgacgagagtttttccgagatgcttctgcgaaagattgatgagcgcggcatgacggacgcgcagtgctataagaaggcgaatattgaccggaagctcttctcgaagatccgctcggacaagtcctataagccttctaagcccacggtcattgcatttgccatcgcccttgagctgccgcttgtggaaatgaaggatatgctcatgaaggctggctttgcgctctcccattccaataagtttgacatcatcgtggagtatttcgtggagcgcgggaactataacgtctttgagatcaacgaggctctgtttgcatttgaccagagtttaataggagcataaggtctatggataaagtatttcagaaatttttgcgaagtggtattgaactctctgtcgtaggagtggagtgtcgtgaagataacaacccttacttttgcacgcccaaaggtgcatctatttttggctgggctggcgtggatggcattcacttctgctttgttcgaggcttcggcagtatggtattttccgtcagccccacgaactcggctccggatttcgttcatccgctggcaaacaattttgcagactttctgaggctgctccttgcttgcggtgattcggcagcgttggaacaggcgtggatgtgggataaagcccaatttgaagcctttttgcgggacaaccctccaacgcatgaacagaaaaaagcgctatcagagcttgccgagaaaatgaaattgacgcctatggaacaaccgtgggcatacatcaaaaagctgcaagcatcctttgattatagcaagatcaagtacaccgaggactattatgatgttgatatgaacccggaagcagaaccgaccatacctgaatggaaggtctactttgatggagacttctggggacattcaggaaaagaccgttccggaacggaactccggttgaataagcaatttgactgggcaggacatcattgggttattcctgcggcgtattcttgcagcaagggactcgtcatggacttttgtatgcgcaccccagaggatgacatccgcaagttcatgacgaaatgggatttgcaccccgaaaacgactcctgcgaatacttcacgcaggagcagcaaatgcaaattgatttagacaatccgctttgccttgactttattcctcgtttggaattgaacgggaaaacaatgcgaatctcccacggctgctcggtggtttataatccgtgtttgccggatgggatgatcaatgaattggaagcaaagtgggcgttggaacactatgacttggatatatcctatggatggatgatttttcgggcagcttttccgtgggcaagcaaacgccgtactgaaataaaatctctctcctttacgatggagcagcggtcatgccgtgtcccaggaccacattttaagacacacgctcccggcgattcgttttctttcacccatccggtcagcggcacaaaatacacattaactgtacaggaattggagcggcagacaatttccgaaaagcgtttcggctctgaccgctggttttatccgacgcattttaccgccatgagctatacgctttctcctgaaccggacagcgatatttcgatctgtgattgtgctgagggggacaagcctttggaaattgcgccatgctctgaccgctatgcaccggaggcacgaaacgatatggcttgtatcggcattatcggcggcgcggacggtccaaccgcaatcgtatgtggaggcagctcgaaagaaaaactccatgcagcttgttccgctctacactttgagccggtggagggtgatattgaatggcgtatcgtattcaacatcaaaaactccaatgaaatgtcattagagctaatctgagaagaaatcggaggcgcagaagatgaagcagcgcatatacattgcaatcgacctgaaatccttctacgcctccgtggagtgccgggagcgcggcttagatcctctggacacaaaccttgttgtcgcagacgaaagtcggacggacaagaccatctgtcttgccgttacaccctccctcaaaagctacggtatctccggacgcggacggctgtttgaagtcaagcagcgcgtgaaggaatcgaatgtcggacggcagcacgacgcgccgggacacaggctggacggcacatcgcacttcttctcagagctgcaagcaaacccgtctctggcgattgacttcatcatcgcgccgccccggatggcgtactacatggagtacagcacccgcatctatcaggtttatctcaagtacattgcgccggaggacatcgtagtctactccatcgacgaggtgttcatggacgtgacggactacctgaacacctacaagctctcagcacatgatctcgccatgaagatcatcctcgatgtgcttgaaacaaccggcatcacagcaaccgcaggaatcggcacgaatcttttcctctgcaaagtggcaatggacattgtggcgaagcacatccccgccgacaagaacggcgtccgcattgcagagctggatgagatgaagttccggcgtgagctttggacgcatcagcccctcacggacttctggcgcgtaggtcgaggcattgccaagaaacttgagcaaaacgggatgtttacgatgggcgatgttgcactttgttcagagcgaaacgaggacttgctttacaagctgttcggcaagaatgcagaattgctcatcgaccatgcgtggggttgggaacctacgaccattgaagcgatcaaggcgtaccgtcccagctccaacagcatcagctccggtcaggtattgcactgcccatacgagacggataaagcaaagctggttgtccgagagatgacggatttgcttgtgctggacttggtggacaaggggcttgtcaccgaccaaatggttctcacagtcggctacgacattgagaacctgaccgatccggcacgacgggcaaagtatcacggcgcggttgagacagatcattatgggaggcagattccgaaacaggcgcacggctctatcaatctcgacggtcacacatcatctactcgcaaaataatgtgtgctgtgtcagaactcttcgaccggatcgtggataagaatctgcttgtccgccgtatgtatgttgttgcaaatcatgtcctgccggaagctgatgtaccgaagaaaaacgacggtgcagtccagctcgacctctttaccgactatgccgccgaagaggaaaaacagaaagccgaagatgccgctttggagcgtgagcggaagatacaagccgccacgcttgccatcaagaagaagtatggaaagaacgccatcctcaaggcaatgaatcttgaagaaggtgcaaccgcgaaagaccgcaatgcgcagattggagggcataaggcgtgaacggaaaatacgacgagatcatgggacttcctcaccacgtttccaaaacgcgaccacaaatgccgatgtcagatcgtgcagcgcagtttgcgccctttgccgccctcaccggctatgattctgcaatcaaggaaaccggacgtctgaccgacgaaaggattgagcttgatgagggagccttgaccgctttgaacatgaggtatcagcttctcatggatgcccttgatgaagagccggaggttgaaataacctacttcaaacctgatgagcgcaaagctggcggtgcgtatgtaactgcaaccggcgcagtcataaaggttgatgactttgagcgcctgattaccatgcaggacggcacgaagattccgatggatgacatcctaagcattgacggagagctgttcttgtccttagaataatgtcgcttgccatgcgaccaaatgaagtgaataccgaagtacaatatgactgtaaggtgagacaccaagcagtcatatttttatatacggaggtacaaaacatgagaaagaacttgacggagatcgtattcatccttgatcgcagcggctctatgagcggactggaaatagacaccatcggaggattcaactccatgattgaaaagcagaaaaaagagaatggcgaggcattgatctctaccgttctctttgacaacgtgagcgaggttatccatgaccgtgtgccggttcagaaggtggagccgatgaccgacagggactattccgttcgcggctgcaccgcgcttctggatgctatcggcggagcgattcatcacattgggaatgtccataagtacgcaagaaaagaggatgtccctgaacacacactgttcgtcatcacaacggatggcatggagaatgcaagccgccgttatgacagcgagaaggtcaagaagatgattgagcgacagaaggaaaagtacggctgggagtttcttttcctcggtgcaaacattgatgcagttgagacggcaaagcattttggaattggagcagatcgagcggtcaattaccactctgaccgcgagggaacgcaactcaactatgaagttctgagcaaagcggtttccgctgtccgatgcagcgtaccgctgggtacgaattggaaaaaacgtattgatgaggacttcaattccagaaaggacgggagaaagtaatgagaacaatcaccgtaaaagggacaggcaatgtctccacaagaccggattacatcatcctatccctgaacattgaagtcttatctgaaacctatgaccgcgcaatgtcggaagctgccgagagaatcgaaagactgcaaggtgccgcagtccgcgttgggtatcgcaaggaagacctgaaaaccacgagctttgatgtccagacaaggtacgagaatgtcaaggatcggcaaggaaattacaagcgagagtttgccggatatgcttgcagctatcgcttgaaacttgcctttgactttgacagcaagcagcttgcaaaggtcatttctgcgattgcggattgtggggcgcaaccagaactcagcattgcgttcaccgtgaaaaacccggcaagagtctgcgaagagctgctgatcaatgcgacggagaacgccagggcaaaggcggagattctttgcaaagcatcaggcagtacgcttgggcagttgctcaacatcgactacaactggggcgaactcaatgttttttccagaacaagctacgatgttgaagactgcattcagcctctcatggcgatgagcaagtgcgccgcacctgagattgagccggttgatattgatgtgacagacacattggctttcacatgggaaatccaatgattttttaacttttttgaaatccggtactcaacaaacgccctttttgtgtccgttgtaaagtgaagggacatttcacggaggaatcttcggggaatacgattttgggagattagcaagcaaatccggtgagtacccaccggagaaaaatcagttaaggagaccctgcccttaacatcagatttttgcttgttgggatagtcccaaacccttctaatctttacgacggagggcacagcatggtacgaagaacacgagacattcagaagaagatttggctgacaccacaggaagaacggacgattgcaaagaagatggagatgatcggaacggagaacttcggtgcgtatgcaaggaagatgctgattgacggctacatcattgtcgtagactacacagagcagaaaaagctcgccgccgaaatcaacaagatcggcgtgaacatcaataccgtctgccgcaggatcaactcgacgggacgattctatcaggacgatattgacgagctgaaagaaaagatggacgcggtatggcagttactaaaatcaaagcaatccgaggaactttgagcaaggcaatcgcgtacattctgaatcccgaaaagactgacgagaagctgctggtctcgtcctacggctgtgccagcgagaccgcagcgcgggaatttgaatggacgcggaaaatagccgagcaaaaagggatgaatccggtcaggatcatagcccgtcatgtgatccagtcctttgaaattggagaggtcacaccggagcttgcccacgagatcggcaagcagtttgcagacgaaatcctcggaggaaaatatgagtatgtgctgaccactcacattgacaaagaccatgttcataaccatctgattttcaatgcggttgactttgtggactaccacgcatacaagagctacaagcggatttactatgatatgcgcgaggtcagcgaccggctctgtaaggaaaacggtctctctgttatccctccctctcagaacaaaggcatgggctacaaggagtacaccgaagccaaacgcggcacgagctggaagcagaaactcaagcagaccatcgaccggcttgtcattacagcgaaggattacgatgattttctgcggctcatgcaggaagctggttatgaaatcaagaccggcaaatatatctcctttcgcgctgaaggacaggagcggtttacccggtctaaaaccatcggagagaactacaccgaggaacgcatcaaggagcggattgccggacggacgccgcgcagaaaccggaggcagaccgtgccgaagggcatctctctcatcggagatattcaggagcggatcagacttatcgacagcaagggctatgagtataaagccaagctcacgatcctcaaggaagcggcacggacgctcaactatctcacggaaaacaacttgctccaatacgccgatcttgagaagaaggtcgaggatgttcacagctcctatgatcgtaccggcaaggaactgaaagtcgttgaagcacgtctgcgggaagtccagccgcttattaaaaacatctccaactaccagcgcctaaaacccgtatatgacgccttccagaaggcgaaagacaagccgagcttcaaggcaaagcatgaagccgaacttgtgatctttgaggcggcgcggagtacgctgcttgccatgcagggcgatgaaaaactgccgagcttgaagacactgcaagcggaacagcagcgacttcttgacgagcagcagcgactctatgatgaacgtgcgaagctcaaaaaagaagtaaagcaaatagagacaatcaagtctaatgttgatacgtttctcgctccttctgctgaccatgaccgtgatcatctgcgcggcacacagcgcgaataatctcttcaaaagcagggcatcttctgttgaccggagatgccctgcatccttgagagaaggttcgagaagttgaaactatttctttaatttctgcatcaacggattgcttttgagaatgaaatccggtataatattagaaacgatgttgaatgcaagcaagcgaaaggatggttgccgtgcgcataagctataagaaactatggatgcttcttctggaacgcgacataaagagggcttctctacgacatgaagtagggttgtctgccggaacatggacaaaactgaataagggggaagaagtgtccctctctattttgctgcgcatttgtgattacttgaactgtgacatcggagatatatgtgaggctgtgcgaacggacaagaactaagtccggtttttcgtacagctctttttgtaggatagtaagtgtgaaactataactttggaggttgctgaaatggctgagaataacacaagcaatatcggctttgaaaaacaaatctgggacgcggcttgcgtcctgcgcggaaacatcgacgcatccgaatacaagtccgtcgttctcggattgattttcttgaaatacatttctgatcgcttcgaggcaaagtacaaggaactggttgaagaaggcgatggatttgaagaggatcaggacgaatacactgccgaaaacatcttctttgtccctgagaatgcacgatggagtgcgattgctgctgccgctcacacgccagaaattggcacggtgattgatgacgcaatgcgcagtatcgagaaagaaaacaagcgcctcaaagatattcttcctaagaacttcgcccgtccagagctggacaagcggcgtcttggtgaagtggttgatctcttcaccaacattcagatgatcgagcatggaaacagtaaggacattcttggtcggacatacgaatactgtctctccaagtttgccgagcaagaaggcaaacttgctggtgagttctatactccctcttgcgttgtacgtacccttgttgaagtgttgcaaccgtttaatggacgtgtttatgacccgtgctgcggctctggcggtatgttcgttcagtccgcaaagttcatcgaaaatcatggcggcaacatcaacaagatttccgtctttggtcaagactccaacccgaccacatggaagatggcgcagatgaatcttgccattcgcggtatagaagccgacctcggcaagtttaatgcggacacgttctttaacgattgccaccctcaactcaaggcagacttcattatggcgaatcctcccttcaatctctccggctggggtgcggataaactcgttgatgatgtccgttggcagtatggtacgcctcccgctggaaatgcaaacttcgcgtggttgcagcacatgatctggcatctcgctccgaatggtcgtatcggcatggtgcttgcaaatggttcgctttcttcgcagtccggcggtgaaggtgaaatccgcaagaacattatcaatgctgaccttgtggactgtatcgttgcaatgccgacgcagctattctacacgacgcagatcccggtatcgctctggttccttgcaaagaacaagaagcagaaaggcaagacactattcatcgacgcacggaaactcggcactatggttacgcggaagctgcgcgaactgacggatgtagacatcaagaaaattgccgacacctacaacgcctttgtagaaggaacgcttgaagatgaaaaaggcttctgcgcggttgttactacgcaggacatcgcaaagcaagattacattctcacgccgggacgctatgttggcattgaggaacaggaagatgacggtgagccgtttgaagagaaaatgggacgcctgacttctgaactgtctgagcttttcactaagtctcatgaaattgaagctcagatcaaagaacgactgggggcgattggatatgacatctgagtggcatgaggtaccgttacgagagctggttgggtatatttccaaaggaattgctccttcgtatgcagaagaagcatccgagacaaccattagagttctcaatcaaaagtgcaatcggaatttccgaataagctatggagattcaaggttgcatgataccctgaaaaagaaagtccctcctgaacgatatgtcaaacctgatgatattctgatcaattcgacaggtgcgggaactgctgggagaattgcgcaaattgaagatgttccgtccgcaactacaatagacggacacatgatccttatccgttcaaacggaaaggtaacgcagaagttccttggttacgctcttaaagcgcaccaatgggaagtcttgcagttggatgaaggctctacgggacaaactgaactaaaccgtgaccgcctgttagatgaaattatgatcaactaccccgtgtcatttgatgagcagaacgccatcgtaggtacgcttgaatctattgataggaagttgattgtaaacaaagagataaacgataatttagctgatctcctgcaaacgatatatcaagggcggttcggcaatgacattttggcagtaaatcagggagtcctctcggatatttgctcatattcaacagacaaagtagctgtctctgagttgaacgtcagaacctacttctcaacggaaaatatgctgtcgggaaaagctggttcaaccgaggcgacaagcctaccaactacatcacagacaaccgcttgccataaaggtgatacgttgatttccaacattcgtccttactttaagaagattgtctactgtgaggacaaatgtggctgctcaaccgatgttctttgctttacgccaagccagccgtgttactcggcgtacctattcagcactctatatgccgacaagttcttcgcatttatggttgctggatcgaaaggaacgaaaatgccccgtggagataagcagcagattatgacataccctgttgttctaccatcggaagaagagttagctgggtttaataccattgcttcaccacttcttgagcagatttattctaatagagcggaaaataaacggctgtccatactaagagatacccttcttccaaagttgatgtccggagagatcaatgtctctgccatccagctctaagccgctaaattatcgtttaccgcctgaatagctctcaccagtggcgagagttttacaaaagggactgccactgaatgtcgttctcttacctcgaaaggagacacgacaatgacagaacaactcatcacggagatacagcaaaaaatgcttccgtatctcaacaacgaacagctcatgcaccttcgggatgcaatgactgcgacattagttggggcaacgatcacctatgatagtggctcaatcccagcagaagaaacagatgcagtcgaagcatttatcacggcaaagcggatcgaaggctgttcggagaaaaccctgagctactaccggaagacgattgaggctctgatttccagagttggaaaggctgtgcaacagatcaccacagatgatttgcgccgctatttgaccaactatcaggttcagcgcaggtcgagcaaagtaaccatagacaacattcgtcggattctgtccagcttcttctcttggcttgaggatgaggactttatcttgaaaagcccggtacgccggattcacaaagtcaagactgcaaaggtggtcaaggacacctacaccgatgaagcgttagagctgatgcgtgacaactgcacaacagcacgggacttggcgatgattgatcttctggcatcctccggaatgcgtgttggtgagcttgtcacgctaaaccgcgaagacatcaacttcaacgaacgcgaatgcgttgttatcggcaagggtaataaagagcgattggtctacttcgatgcaaggacgaagatacaccttcaaaactatcttgagggcagaaccgatgaaaacccggctttgtttgtttcactgaaagcgccctttgaccgattgatgattggcggagtggagacacgccttcgggagctgggaaagcgtctgaatatcccgaaggttcaccctcacaagttcaggcgtacactggctacaactgccatagacaaaggaatgcccatagagcaagtccagcagctcttagggcatcagaaaatcgacaccaccatgcactatgcaatggtgaaacaacagaatgtgaagctggcacatagaaaatacattggataggatgggatgaaaatgaggatgacgcaacttaaaaccatcgcagacatacagactggtccgttcggaagccaactccacaaagaagactacgttgaaaccggaacccctattgtcactgttgaacatcttgggaaccgagtattcaccgagcaaaatctccccagagtttccgacagcgataaagcgcggttgattaagtatactctttcaactggcgatattgtattcagccgagttgggtctgttgaccgctgttcctatgttgataaatcacacgacggatggatgttctcgggacgttgcttacgagtccgcccaactgaactggttgattctctgtacctatattattatttctgtttagaagaaaccaagcagtttgttcggaatattgcagtaggcgcgaccatgccttctatcaatacgaaacttcttggagaggtcgaaatcgccttaccggatctgaacaaccagaaacggatagccgctgttctctcatcactggatgataaaattgagaacaaccaaaagctaaacgataatttagctgcttagaggtggacggcagagacatcgatctcgccagacataagcttcggcagcaaactatctctcaatttcgcaagcgattgattctgctcttccaaagtacgttgctgtgcaaagataggtgcgcaaaagtcgctgaatttggcaagaatttcagcgtcaggaataaccgccgggacatttttcatagtgctgccagatacttctttgaatgttgacccggatgccatgccttcaataaccgggagagtgtttttcaagaagaagtaaacaaatggtgttccaatttccggcttaggcacaaccgatttgaaaccttgatttgttgttacttcaccagcggcgatagcaatataacctattggcgcacgagatgagaacaacactgttccttctggcatgattgctgcgctgctgttcttcaaaccgagttcagttatgtcattctcgccatgagaaatgaacttcgacttgttgatagataaatctttcggggttatccatgctataccggactccgtgtaatactcaggtttagcttttgaaggtgtactgcctccaacaacagtaccaagatcgctaattgttccggtagtccattctggactggcattatcaacaaataattcttgaaaataggactgtgcttgctgctctaaattatcgtttacctgatatggaggatataccatgtttgataaagttcaggagagcttgaaaagaagcaaagacgagcgccagaaaaagcggcttgaaaaggaacggcttcgtcttgagaaagccgcagcagaagcagctcgtgaggaagagcggcttcaacaggaggctcaaaagatacagactgaaaaagaacgccttctctcccttgatgacaaggggctgatggttgagctaattttggcaatgcgtggcttatacgcgcagatcgaggatattcaatttcagcagataacattaacttcgagaatcgaagatattgagtcggacatctcttccatacgcagtgatatttcagatttggaaagcagactgggctcgtccgatcagtaagactcaatgaaggaggcgcagacgtgattatttcaccacaatctcttgatacaaacctaagtcagcttttagcggaagttaagtccggctcaatgcagttgccggagtttcagcgcgactggacttgggatgatagccgaattagaggcattatcgccagcttatcacagggttatcctatgggtgccatcatgcggctgcaatacggcaatccggacatccaattcaaataccgtacaattacgggcgtaaaaggcgtttctgtgaagccggagcatttgattctcgatggtcagcagcggcttacttcaatttatcaggcaacatcctctaaagagccggtctcgaccaaaacagaaaaaggcaaggctattaagcgttattactatctctcaatggagaagtgcctcgacgatgatgaggatcgttttgatgctgtcctctccatccccgaagaccgtaagattaaagagaactttgaccgggatgtgaagctcgatctctccaccagagaatatgaatacgagaacaagctgtttccggtcaatatcgtattcgacagcaacgcagttatggactggttcatgggctacatgacgcactacggaatgaagccggaagcaatggacgagttcaagcgtttccaagcggatgtgctgaatacaatttccgggtataagctgcctgtgattacactggacaagtccacgccgcgagaggcagtgtgcaaggtgtttgagaacgtcaatactggcggtgttcctctcacggtgtttgagcttgttaccgcaacttatgccacaagagactttgacctgagaaaagactgggtgcagtgtcgaaatacaatttgcggtttcggtgacacgctgagaacagacttgttcgatgggattgatgagactaccttcctgacaacggtttgtctctatacaagctatttgaacaagcagtctggaaagacaaacacaatctcctgcaaaaagaaagatgttctgggacttccttatgaatcgtacatagcgaaccgggatgcagtgctgtctgggttcaaaatcgcaaaggagtttcttcttcgtgatcagtgcgttttccgtcaaagagatttgccctatacaacgcagttgattccacttgcggcaatctgcgctgttctcggaaaatccaaatgcaatgagccaaacacaatcaaaactctttctcggtggtattggtgcgggattttgggtgagatgtatggcggtgcgaacgaaacccgctatgcctatgacattgaggacatggttgaagaggtcaatggacgtccgaatgcaatgcacacgattaacagcgcagtcttttcttctacgcggctgctaacccttcaaactcgcttgagcgcggcatataaaggtataatggctcttctttacaaggagaagtgtcgtgactttatgaacaacacgacgattgacattgtaaacagtatgcttgagtctccggatattcaccatatattccccgaagcatattgcgagaaaatgggcatcaagcgcgaacggtataattccatcattaacaagaccccgattcttccagccaccaaccgctcgattggcggaaatgcgccgagtgagtatctgggggcaattctaaagaaggttgatggactgaccgagaatgagttgcaagcacgggtggaatcgcactttatcaactatgcagaattgaaggcagatgacttcaatggctatttcatcgacagagcaaaaagccttctaaacctaattgaaaaagcgatgaataagcccgtcactgacagagatgcagaaaacacgctggatcagttcggggcgagtctggcgtaaaagggagtgacaaactatggcaggatattttacagaatcaaattacgagaacgctgtcttgcagcttctcaatgaagaactgggctataactatatctatggaccggacgtggagcgcgattatcactcgccgctttatgaggatgttctgctaccttccttgcagcggatcaacaagagcctgcctatggacgctctgacggaggcaatctataagctcaagaactttgaaaccggaacgcttttgcagaagaacatggtctttatggactacctccaaaacggagtcccggtaaaatactatgacaagggtgaagaacgctctacccttgtttaccttgtagacttcaaaaatcctgccagtaacgagttcacagttgcgaatcaatggactttcattgagaactccgaaaaaagaccagatgtgattctctttgtcaatggtctcccactcgtcattgtggagttgaagtctccgtcccgcgaagaaaccgatgcttccgcagcataccgccagctccggaactatatgtatgagatcccctctatgttcatttataatgcggtatgtgtcatgagtgacttgaccacttcaaaggctggtacaatcacgtccggcgaagaccgctttatggagtggaaaacaacagacggcagctatgagaatacgcaacacgcatcatttgacacattctttgtaggactgtttgagaagacccgcttccttgacatcgtgaaaaacttcatctgctttaatgtggatggacagaatactttcaagatactcgccgggtatcatcagtatttcgcagtcaaaaaggcgattgagtctacaaaacacgcaaccgtgacggacggtaagggtggcgtcttctggcatacacagggcagcggaaaatcgttgtctatggtcttctatgctcattatctgcaagaagcgttagaaagccccactatcgttgtcattaccgaccgtaacgatctggacgaccagctttacggacaattcgcccgctgcaaggacttcctccggcaaacgccgcagcacgctgagagccgcaagaatctgaaagaactgcttgcaaacagacaggcaaacggcataatcttcacgaccatgcagaagtttgaagaaagcaacgaagctctttcggagcgtcggaacattatcgtgatggctgatgaagcgcatcgtgggcaatatggtctcaatgagaaggttgtggtcaagcagaaggacaacggcgaagtcgaggcgaaaaccgttatcggcactgcccgcattataagagacacgcttcctaatgcgacctacattggattcaccggaacaccgatctccacaaaagaccgcagtacacgagaggtcttcggtgattacatcgacatctatgatatgacacaggcagttgaagatggcgcgaccagacccgtctactacgagagccgtgtgattcacctgaaactcgacgagaacaccctccatctgatcgataatgagtatgacattatggctgacaacgccgatccgtatgtcattgaaaagagcaaaaaggaacttggtcagatggaagcagtcctcggtgccgaccagacgatcaattccttggtaaatgacattcttgatcattacgagaattaccgtgagaatatcctaaccggcaaggcgatgatcgttgcttattcgcgtcccatagcaatgaagatttataagcgcattcttgagctacgcccagcgtggacggaaaagattgcagtggtcatgacgcaaggcaataacgatcccgaagaatggcgtgagattatcggcaacaaagctcataaggacgatatggcgcggaaattcaaagacaacaactctccgctgaaaatcgccatcgtcgtggatatgtggctgaccggctttgatgttccctcccttgctacgatgtatgtctataagccgatggctggacacaacctgatgcaagctatcgcccgcgtcaatcgtgtcttcaaagataaagaaggcggtttggttgtcgattacgtcggtattgcggctgcactgaaacaggcaatgaacgactatactgccagagacaagaagaactatggtgatacagatgtaagcaaggctgcatatccgaagttccttgaaaagctctctatttgcagagatttgttccacggattcagttatgagaaattcatgaccggaagcgacctcgacagggcgaagctcatcagcggcggagtgaacttcatactcggcaagagtgttgcagagtacgagcttcccgaccatgagaagacacagaatgtgtttatcaaagaagccctgcttctcaagcaggcactttcgctgtgcagcagcttggtagacgagcaaactcgcatggaggcagctttcttcgagtccgtaagaacaatgaccgtgcgcttggtttcaggcggtaccggaaagaagtttacgcttccggaagtaaatgagcgcattaacgagcttttgaagcacagcatcaagagcgaaggtgttatcaacctcttctccgatgtccagactgagttttcgttgttcgatccgaagtttcttgaagaagtggcaaacatgaaggagaagaatcttgcagtcgaactcttgaaaaaactgatttccgaacaggtctctgtttaccgtcgaacaaatattgtcaagtctgaaaagttctccgaaatcattcagagcgcaatgaaccgctatttgaacggaatgctgaccaacgaggaagtcattcaagaattactcaagctggcgaaagacattgccgctgctgccgccgagggtgaaaaactcggattgacagcggacgagcttgctttctatgatgccctcacaaagccgcaagcaatcaaggacttttacgagcatgacgagcttattgctatcacgaaagaactgacagatttgcttcgcaaaaaccagacaatagactggcaaaagaaagagagcgcaagagctggaatgcgccgcctggtcaaaaggttgctgaaaaaacacaaatatccgccagagggtatggatgatgctgtccagactgtcatgagccagtgtgagatgtggacggacaatgtaatgaccgcttaactcccctacgagaaaggagtagatcatgggcaattcagtcatgttgaatggaatcgaatatgccggagaacagattgcctacaaagacagcacctatgagcttgtgtcaaaggtcgcttacctgatcggcgtcccgcttcgtattttccaaaatgaacacgagccgccgaagatagagatatacaaccggcttgaacaggataaaaatgcccgtatcattcgtaatctatgtatcatccgcaccgccattgagcgcaactaccggaaaataaatgacatcatgcgaatggagtatcgagggctgctttcaatgccagagatcatcccggcttccagtatgcagcagctttcaaatgacggaatcagctttataaaaaagtcgagtacaaagctctgccaccacattatcgagatcaaccggctgatttcagaccgcattaacaactgcaagagcctctttccaatctggattaactgggcgtacataaaagagctgttcatcatgccaaacggtttgacagaggacggaacgaaagatgctgccgatatttattacgcaagtctctcctactacccctatcaaatgtatatcaactgggtaccgatggacgagggtaatgtcctctataatgataagaagtttgctaccctgctttatcaatggcattgcgacgccttcacggaatacagtaaagtctctgatgcaggggcttttgtaaaaaacaatatctacgacttcatagatgacagcgagaaaaccgtatttgtggtggactgcgaaaactccgacccgtacaaactgtgtgccacgctcaaaaatcttgattatgaggtcatgcaaaagattacggcgatcattctctttgatgacgtacacaccgctacggcatggcggattcttgaaaactacacccgcattcccgttgagcatatcatgattgagcggatcaagcagaacaaatcactggtagacatcaagctcaccgcaagagcctgtcaggaacactaccagaagcaagtggattccttcgtcatcgtctcaagcgattccgactactgggggctgatctcttccttaccggatgccagattccttgtcatgattgagcgggaaaaatgcggaccggatatgaaggcggcacttgcagaatccgggatattctactgctatctggatgacttctactccggcaacagcgaggacatcaagaaaaacgcactgtttaaggagatgtaccgctggattgacaactccgttcacctgaacgtcaacgatatgtttgatgccgcgctgaggaacactcgaattgaaatgtctccggcagaacggcggcagttctatgagaagcacatcaagcacatgacgctgaccatcgacgagaacggaaacgtcagcattgaactgaaacgcggatagccttggtttctattccgggaggaatgtggatggacaacagattctattttggattcaatacatcggaggaacggaaaaagcgcagaaaagcagagctgtactccatgagtgagcaagtcagcaccttcttttgggatgaagccccgcagcatggattggaaatgcgtgaagggcagcaggatatgtcatttgagattgtggacgccctcataaacgaccagcactttgcgattgaagctggcgtgggcattggcaagtcctttggctatcttgtgccggtgctgctgtacagcaaacgcatgaacaagccggtcatcatcgcaacctcgaccattgcgcttcaagaacagctctggcgcgatgtccacgcggtaatgccccttcttgggctgaacagagatgtcatcctcgcaaaaggacagacccattatctctgcaacaaacgcgcagatgagtatatgtgtgacccgaaagcagacccaccggacgcgctcaaagaaggaatccagcaggggtatgaggaacgcaaggatttcccggaggttttgccgcaaggcgtctgggacaaggtaaacgtgcagcggttcagcatgaagaattgcggctcctgcgaaaagaaatgcaagtattacaaggtccgtgcatcgttaaaatacacggacggtgttgttctgtgcaatcaggactttcttacccagcatctcatgaaactacgacgcgggcaggacggactgattaacgccgccgctgatctgcttgtcgtggatgaagcgcacaacttggatgataaggtgcggagtgccacaacggagcgtttcgggcaaggtatgctctttggaatgattaaaagcgcattctatgaactgcgaccctctgaccaaagcagtgtgtccggtgaaaagcgagaggcagagagcgcaatcatcgccttctataactgcctgaaagcacaagttcaaaagcagatcgacgatgcagatcaggatatgcgctacgctgaccgctttttctttgaccaaagcggcagtgcgattgaactgcttaccgagatgaacgccgccatacacaacctttcgtccagcattcagatttattccagcatggatttcagaaacaaccgttcctttgctgcctctgatgatctggatgccgtcagcgagtccctttcagagcttcttgaccggatagatgatatgctgatctggattgagcagcacggcagcaacacggaactcgtctattgccctaaaaacacaaaagaaattgtgagccgcctatacttcaatggtgatgaaagaaccatcttgacctctgccacgctgacgaacgccacgagcgggtctctggaagaacagtattcttactttatcagcaataccggctttcccgctggtgatcgcggctgcttatccgagccaaagccttccccatatccatacgatgaacacgccatgatctactattgcgacgatctcccgcacccgaccagagaacatgaagccttcattgaaaagggtgtggagcggctgcttgagatcctgagcatttccaatggaaaggcactcgtgctgtttacggcaaagaccgacatggaagaggtctactccattctcagtgagaaaaatcttccgtacaaaatcctgatgcagcagccgggatcgtcgcaggacaaggtgctgcttgagtttaaggaagatacgaactccgtacttctggggacgggtgcatattgggaaggaatcagcattgaaggaaaaagcctttccaatgtcatcattttccggcttccgttccctgtccccgatccaattatcgagtataagtgttccgtcgcaaaggatgccctgatggatgtccgcgttcccgaaatgattatcaagctcaagcaaggtatcgggcgattgatccgcaatttcacagacaccggcattgtctgcattatcgaccgaagactgcgggacgagccgccggaacgctatcatgacattacatgggactccctgcctatcaaaaatcggacaagcagtttggacgaacttaggaagttttacgaaggtctgccctcagccaaggaatgatgatacaaacggcagtctcttcggaaacatagagcagccccccaaaaaacgacaatcagaaaacggaggtgtatcatgttgtacaatgaaaatctgcacgaagaagaacaacatctgatccagcagattgccgagcaaacagagagaggtaaaatcggctgggaactgacggagtataatccgctgtcatttctgaatgaggacaagatagacaaaaacccagcagtaatctgtcagtccttctcctttgaagcgatcatcggcggctcccgtttcgagcttgatgtcatggagaatattgatgtgccgtccggtatgggagactacaccataaccttgacgcgggatgaaaccgaaaattatcttaaaattgaggatgcgctttcctttgactgtgaccgctatgaatgcacaccggaggaagtcgcagagcgatttgcggacagccccattgtccgtctctgcaacgctatcattcctgccacgcttgggcaggaggatttagaagaggtcttcacatgggcaaggtttttcaacgagactggcatttctgcaaagctaatgaatcatccgctgaccaagctctgtgaaaagctgttcgacgaacaccgtttgatggacttccatcgcggcatcttggatgtggactatcgaaagctgctcctaaatgaactggctcataactaagacacggaaaaacgcccccgacactgtgccagacgcacagtgccgggggcgttcccgtttccagcgatttattttccctcggcaatggactgtccataaggtgacactttccgttttgcgatgccgcgaaaattcgatgtgttccatggagatgttcactgggcagcatacgccgtacacgtttccaataatcactgagcagtgcaatgagtattcgctatcgggaaatacttcacggttttcacaacgcttgattcagaagggatttttttgccttattcccgcgtgacatcaagggaaaccggattgatgacgatgacggtcttgccctttttgtgggcatatctcacggtattcccggtaccgctgggacatccattccatactgcgagaatataatcggcgtgatcgaccatgtaccgatttctcttgtccatgcagtccggcgtgtactcccgttgcagcatggtctccttgtcacactttgccgcgatattataataccgttcccgtgaagccacagaccatttgatcgcttgtgtctcacaagggattgcactttccagagtaatgtgagggtattttgatttcaaatcgagtacaatttccgcagcgtacatatcgacgccaagagccatgccggtaataaaatgcgtgacgccctcgttctcgatgagtgctacaatctgatcccgcataacagatttcaaagaagtacaacgcttatcggattcatcaaagccgaacggaagactctgcggtctatgaccggtaaacgcacaagtcttgccttgaacggattgcttttcagctttttgagcagactttctaaactcaataatgcgcgacatgacaccccttctttcactcttttggtaggtaactccattctatcaccctcatcacggacagtcaacgcattgtcgttagtaaaattaacgacggcgtgccgtggataatgacaccgccgttaggtacactaaatgcaaaggtggtgaggctatgcgagagaagaaggacatcaatattgaaatcggcggcaatattcaagtggcaagagaacaggcgggctatacgcaggacacgctctcagaaatgcttggcattacgccgaatcacctgagcgctattgagcgtggtgcttccggtatttctcttgaagccttgcagcgtctttgccgtttgctgggcgtcagtgcggaccgaattatctttgggaccgatgagccagaagcggaagcccttgcgcttgccagacgtatttcggatataaagccggaataccggcaacaggttcaagagctgctgtccgctattttgaatatgtcataatatgtcataaaaaaagagcctctgccgacacccaaactgggcatcgacagaggcttttggttcgttttccgggcattcaaacaagtgccgaaatcgacacttattctcgctctattgctggaactgtgcggggaatataatcacactgggcggtcattcctcgtcgctctgaggcttgcaatcacagactttttcgacccctaactgtctacaccgcgatgccttgcgggagaagtgcggacaggcgatgagatccgcacggaagctctgcttgcagctatggacgcagcggacgcagaagcggttatacttccggcgtccgctatctccgatgaagaacgaccactcctgccgccacttctgacttctgctcacagctcaatctctcctttgtgctttttgggagggcagcagtccttctgcttttcagcctttgcagacttgagcctgtccatgatggaagacttctcgcccctttcgggggctttgacctctgcggtcttgtcctccttcggaccgttgttgatgatcccgtcaatcatgccgtagtcatcctccatcgacatctccgctgccttgaggtagttttccttctcaagagctgccatccagctttctttgctgataccgagcattccgccctttgccgcatgatcggcaatctccttggcatccacgcacaagccctcggtattatcggaatatagacggtaaacctcgcaccccttctccaaagccttctcagccgcctcctgaccggcgggaagaacgccagcccatgcgtagccgtagtccttcatatcctgaacggagagcgcgggatcgggcatttccggcacttccttgacctcaaggtcgagaaggcggagcgtgtcatcgtcaaagccgttgtagacatcatcaaggacgagcttaccgcgctcatcgacgatgatgcaagccgcctcatcgccgtaggtgtcatgctccatcaggtaaaagctgtgaccgccgatttcgtgctggtcaatggtgtgccacgtcccgatgtgaccggcaaccgtcagaccggaggtatcggcgttcatctcaaagtccttctgctgggcgacttcctgcttctgctgctccttcgagatcatggggatcgcaacaatcttatcgcccaacttaacaaactgttccggcactttgaagaggtcagagaacttctgcatctgctctacggtcagagaaccgaagctgtcatccgtcaagccgactaccatgaatgttccggcaacaacgtcatagatgtcaccgtcctcatcacgcagagcgcggttcaggggcagaccttccagcttgccttcctcgttgcagactaaggcaaccgggtcttcgtaggggtaaatcgcctcgatgcagccgccgacctcatgctgcaaggactccagaccggagtcaatctccttcacataaggctcctttcccggctcaacgacgagaacggcgatggtgctgtcacgctcggcggcttcccctaagccggtaatccggtattcgtcgggaatatcatcaagatcgccgttgaactgtctgtcccacctctcgcttgcgacgcggacatagccttcatcggtgaagtgtccctgctcatccatcgcaatgtcacgcccatagcgttcatagtcgatgtaatttgccagaggaccgagatccttttcggagtagataccggcttcgtgggcgtaataatagccgaggtcggattcgtcgttgataccgggcatgatgtcgtagcagtccagattgaacgtcaggttgatgagatcgtcgatgtcgctgacctcatcgcaaccggcttccataatggcaacgagcttttcctgatcgctcagggaaagctcgtcaatcaaagcggcaaggtagttgagcttatcaaggctctcgtactcgccaagcatcttctgcacgccgtagatcgggcattcgtagtcggtgataaaccactcttcgtagggctgaccgaactcatcctgcttgccgatcccgatgcgctcaaagaccttctgcatctcttcttcggttgtcgggaacttcacccactcaccgaccagcataccctcgttgtacttgccgaggttcgtgacgaaggcttcaaaatcaccgtctaatacgggcataggcatcctcctttcagtcatccaccatgccgtccggcatgatatacagttcctcaaactccgtgtccgtcatggcttcgagcttccgtatggtcttatacatcagctctgcgatctcgccgtccatgtcgttcagggtgacgcccttcatatcgtcgatcagccgcttccggctggacgtgttgaagcagcacatcaggttgatttcttccacagtaaagtttttcatatcagagtaccatatcctttcctttcgatttctgcggtttcggtgtgtgggtcggctgtgccttctgtgcggatttcagcttgtcgcggatggattcacgggcagcgggtttcttggggatggtgtcgtagatggcagttccggcatcctccacatacgagcggacatactgaatgctttcagaaaagcggatcggtctgttcttgtcctcaatattggtcagttggacttcatcggcagcaaaatcaaccgcgtcgattctgcacttgatgccatccatattcagcgtcgcgccgacaggaatgtaatctgcgcctttgagttccttgaaggtctcgccgtccttgctgagaaagacatctgcaccggacttccagagcttgtgagaaccggctacccatgcagcttcacggaagccagtgaccggcatggaaggcttaccgcgcaccttcttttcaaggagctttgtgccgagaagcggtgcggctttttccgcgtccttgccgtacagctcgaaatagccgttctgggcaaagcagaccagcgcgtccggatgtgcctttttgactgcctcgtacttgcggagttctgcaacgggcagaggcgaaagcgcctccgtcctctcagtctccggcagtctgtcacggcggcttttctgcttagacagcacttccaccagagcatccgcgtccttcgggagcgtctggtgggttttgacgccgccatgctcaccgaccagagccattgctgcatcgaagctgctgcggcagggggcttccagcacaaagccgtctgcgaaggtcagccggtcatgatccggcgcaaccgcgttctgcgccacatttgcagcctgttcccggtagttgatctcaaagacatctccgaagaccttgccgcgcttgacggatttcgggacaatgacgcgggcaacgcactcgtcgtaggtctgttccgcataaaagcggaaggtgttgtgatcccgcgtcccctgaataaagacctgattttcgttgagacagtgcgttccatgcggacggcagaaccacatcagcgttttgtcttcgggattccggctttcggcagcgcggcggatgatacgcttgtcgatgtcgaagtcttccttgtagctgtctacatgactgtccacgagcttctgcagctccgcaacgatgtcaacgtctgtgtatttcttcatgcgtctcctttctcacaactccatgtcgtgcgttttgaatttgaccggagacttcttctccggctgcgttttcgcggcagctttgagctgatcgcggatagagggcttttcctgcttctgctcctgcttgacgtattccagcgtcggcatcagctcacggtaacagccctgtgttttccgcgccgcatgacggcgatggattttgaacagcggctcaccattctgcgtgaccgtgttgccctcaatcctgacgccgttccgtgccagcagattgaaggagtggttagaggcgcggtaggaagcccgcattccgtcgttgttataggcaatctgccccttgagcgtgtctatgacggcggctttgatttccttctcttccgcagtcagacggtgcgccttcggtgcttgcgctgcttcctccggcaagggagcaaagggagacttgacctccacggtttttacctcaatagaggtaatctcatcgttctcccatgcaacgacctccgggtctctttcctctgttttctcagaagtgacttccttctggggttcggtctgctgacggaacgcatccacgaaaagtgccgtcagtccgggattgggtttatccacaaggaagcgagaggcgttttcggggcagacatcaacggtcttcgcccattccttgaggggctggggaatgcgcccgtcaaagtctttctgctgaatggtgtttgcgaggacatatcggacacgctccggagagaattgctcaaggacgctttttacggcagcatccgcatccagccggttatctccgtagttggagctgatcgccgcttcaatcgctttgcggcattccacgtttgcggcgagagaagcacgatatgactccagctcatcggcttcataggcgtaattcgctgtctcgcggtaaatggggacttccggcttttcctccggaacggtttcctgctcgacggactgtgacttctctgccagcagcaccttgagcttggcgtcaatgccctcgatcatctcagccgccgtcttgcggatggtgtccagagagcttttcagttccttggtttccttgccggatgaccaaccggcgatgtaaccgaaggaatagtccgaggtttcaatgccgtaacgctggcagacggtgtaggcaacgctttccgcttcaacctccttggtgtgccgatccttcttatcttctggcgcggctttctcgtccggcttgacggcgtggagctttgcgtgggcgatctcgtgaatggcggtcttgaccgtctggatttcgctcatgccctcctgaatggcaatgcggctttcaaccggagagaagaatccctttgcaccgcccggaatgtcctcaaaggaaatggggacgggagattcctgcctgagcgcatcgaagaacgcctcgtagttttcgacggtgcctttcagctcatcgacgataatgtccggaagctccttgccgtccgtctgggaaacatcaaagacactcaccaccttgaaggcagggcgcagaacttcgaccgtttccgtgacagtttttccatctgcgccgatcaccggcttctgcgtcacggggtcaatcttctcgcgctcttcctgtgccttgtacggcgcgggtgcgagaatcttgatgcctttttcgcccttcatgacctgacgctcaaagttacgctgccacgaggtataaccggcaacataggttgcctccggcttctgcatcgcaatgagcagcgtgttgttgaaggaatagttgtagaacttggacatcgtgcggagatattccttgaaccgctcggattcaaacagctccttgatgccctgttccagcttgtccgtgatttcgcggacttgctgtgcatttttgttttcagccatttcaaacctccatttcggatttgtttcggggagaagaaacccccgtctgagatttgctcaataaacgagcctttacctcagacggggtttctctgcgtgtcagccgacgatgaaagatgttatcctccttctcccattcaatcagtctgtcaaacatatccgggtgctttgtgaccatgtgcagcagctccgagtcattggcgttgggacagaaccagcagccgtttcttcggcagtgagcgtagattggggaaagcaaaccgtgttcctgacagagcttgtaggcatccgcttcggtcatgccgtacttggcaagcagactgaccttcgttattccatccagacgagcaaggcgttttggctcatcctccgcgatgccgacatagctcacagtgtccggagaaagcgcggtattgtactttcggacgggcgggattttgcagtcccgattgactgcacacataccagcccatgcaaagccgcgaacctcgcccttgtgcggtccgcgggtgatgatatgatggaacacctcatcgtaggtcttgtccgcgtggagaatggtgaacttgatgcccagctccttttcgcagaagggcttgagctggtcataaatgaagtcccggtgttccgggacttcgccgcttgtgtctttgtcgaacatgacctcactgaacacggcttcatccagcggttcattgtgctgtgcagccagcagaagggttgccacactatccttgcctccgctgcaagaggcaatatactttgggcggctcatcggtcaaactccatcttgaagctgacgtatttgccgccgctgtcatccagacgaatgacagcatcgtagagctgaggcttcttcggcgtgtaaagcccggtcactcggcaccagcccttgtccagcagctcctttgcaatcttcttggtcagcttctttttcttgctggaaaagaacttgttgtcttcccacaggcaaaaggagcagtccttgttcgagcagtagaagttgcccttaccgacgtagaccggagatccacaacgaggacatttgccgatttcctccttacccgtgccgaaacgctgggcttcggcatcggagagaaacggataggctttcacgagatccccggtcatccggacaatgccgctgagaaaggcgtctgcatccgcattgccgcgctcaatctccatgagcgtgttttcccattccgccgtcattgcgggagaggtgatctgttccggcaggacgcagacgaggttgcagccgtcctttgtgggaatgagggatttgcccttgcgttcagcaaagccggactttaccagcttttcaatgataccggcgcgggttgcgggagtgccgagacctttcttctcggtgtcatcgtcgaactgatcgtttccggcagtctccatcgcagacaggagcgtgtcttccgtgtactgcttcgggggcgttgtgaagtgttccgtaacactggcagatacaccatccagaacatcgccctcgtggacttcgggcagggacttcatgggatcgtccttttccttcgtcttgagggaggacttgaacagctcttcgatggctttccatccgttttgagcgacggtcttccccttggttttgaactcgtagccctcgcaggagagcgagatctgcgtttctgcgtaggtgtgcttctcgccggtcgcacacagaaggcgcatcccgataagattgaggattttctgctccgactgaggaagcgccgaaacatcctgcttttcaagctggacggtcgggagaatggcatggtgatccgtaaccttgctgttgtcggttacgcgggcaatgtccggagtaaccgaaacgccggagaaaagcggaagctggcggcagacgatagaaatgacctgacgggcagtgtcctccatatcgtccgtgataaactgactgtccgtgcgcggataggtcaggagcttcttttcgtagagcgtctgaacgagatcgagcgtctgctgggcggtaaagccgtagtatcggtttgcctcgcgctgcaaggtggtcagatcatagagcctcggaggattgacggttttcgtctcccgcttgagagaagaaacgacggcttgctttttctcgcaagccgccgcaattctttttgcttcctcttcggttttaaccttttccagatcggcggtcagatcgcccttgccgacatggacgttgaaatacttctccttctggaacgtggagattttcccgtcgcgctccaccagcattgcaagggtcggcgtctggacgcgcccaaccaccagcttcttgtgatagagcgtggtaaacaggcgggtgccgttgataccgacaatccagtccgccttcgagcggctgagtgccgcttcatagagacggtcatattccttgccgtcccggagatgggtgaagccttcgcggatggcggagtcctccaacgagctgatccacagacgcttgaaggacttggtgcatccggctttgtcgtagaccagccggaagatcagctcaccctcgcgtcctgcatcggttgcgcagaccagctcggtgacgcgcttgtccttcatgagagcggacagcaccttgaactgctgtgctttgtccttcgtgacctcgaacatccagctttccggaacaatggggagatcgtcataccgccacttggcataccgctcattgtaggagctggcgtctgccagctccaccagatgaccgaagcaccacgaaacgatgtaattgccgccctccatgtagccgtccttgcgggacgtcgcgcccaacacctttgcgatggactgggcaacgctgggcttttcagcaatgactaagatcaatcttcatcaccatccgtttcagcatcctccgcaatctgcggctcttcatcctcgttgatgtacggctcttcctcgtagccttcatcatcgaagaagtccatatcctcatccttgggctttctgcccttgacgaacttgatgtagtaatacgccgcgcccgcagctccaacaaggacgaagacgataagaaccataccgacattggatttcttttcgggcttgggagcaggaacgtcggtttctgcatccttgtccggctcaggcataacgggagctgtgccggtgcattcgctcatgttattcttgcagaccgggcagtcggtgttgacctgaccggcagcacatttttctttgcagttacaggtggtcagcgcagccgcagtatcttcatccagcagcgcaagcagatcgctttcatcgaccatgttcaggaagtacgtctgatactgttcctcatcctcgttgatgggcgcatcgtagtcgatgacaatgaagaaggtgttgccgttcttcgtctggacagtgatgaactgcttgttggttgccttgtcgtatagcaagtcgcgggtgtaggcgttgccctcatcgtcaatcggctcacccatcggcttttccggcgcgggagtggtttcaggctgctgttccggctgggttgcctccgtgacgggaaggttctgatcagtgtcatcggcgtaggcaaacgccgtcaccgagaagcaggacagaaccatgacgcagaccgcaaggacggtcagaaaacgaaacttcttacgcattgtcgattacctccgtattttcagcgggcttggtgccgcccttcatggaagacagaaacgccatgatctgatccttgtccatcaccatagagcgcacggtattgataatttcaaggttttccagctctgtcttcttgtcgtacagctccttgagctgtccttcgatttcggtctttttcttttcagccttctcaatgtcagagaggaccttctgatacttgggattcatgcaaaactcctttcttttaataggcgggtcttccgaaggcgtagaaatgctgctgccaataggaagagttgatggatgtgtactgaatgggatcgccgcagtggatcatgaccccatcaccgacgtaaatgccgacgtgagacacgccgggggtgtcatacgtcccaacgaaaaagatgagatcaccgggctgtgcattcgcctttgaaaccggcgtactgatgttgtaaagcccctgtgcgcccagccgcccggtgttcacaagcccgctgttcgtgagaacatagctgacaaagccggagcagtcaaaggatgtgtcgggattggagccgccccacacatacggatagccgagatacttttccgcctcggtaatcagtgtcgcaaacttctcgtcgttcaagtattccgggttgacattgtagtcggcgggaggatttgtgatgtacttgtccacatagggagagtcaccgaacagatcctcacggttgcccagcaccgacatatacgtcgcgtacatggagagctgttcctgccccatgatgtagaccgggacatgggagagattgaagttttcgagcttcacgttgcagatgtagtagtcatacgggacgcgataggtttccgtgtgcgtgttgccgtctgcatccgtccatgtgtcggtttccgtgcggtatctggtttcgacgatgacctcttcggtgaggatgtactgcttttcaaacagcatttggagcgtaccctgcacctcatccagcgtgaactcgccctcgtggagagccgagagaatggagatcagcacataggggtcatgctcaatatcgtccagatcgaagtggtattcatcatagttgtgagtgctttcgtaggtgtcgagatagctttgcagctcttgctccatccggcaatactgcgcctccgcaccgagcatcgcgtcatcctcgctgagataagaggaagcgataaccgacgagccggtagaggtgagcatcgaacacgagctgataccggcaccgagcaaaacgagaaggacaactccgacgccgatccagatgaagaccttcttgttgttctcaaagaactccttgagcttgtcggacaccttttcgccgagcttcttgccggtattcttcgtggcagtcccggcagtctgagaaccggcattccgtgcagcggcatattccttcttgatgttctgcttctggtagtgcttgttcatgttctgcttcttcatctcaggatgctcctgctgatttctctcatattggagcttggcgtcagctacatccgccttatgttccagcttggaaaccttctcataaggcttgttgacgctgctttcccgatgatgacggaaatgcctcgcagcggtctcagcggcaatctctgttttatgcgccgcctcaaccgccgagttttcctgctcgacctcatggattttgccgtgaatgccggaagcaagggtgtcaccgaccttgcggacggttttatctgcctcaaattgcagcttgcctttgctcttgggctttttcagctcatcctcaaaatgaaggcgggttttgccctttccggtctcttcatcaaagacacgctctttcttgagaaccttgtgcgtgggcagcttttcacgggcagcatccagacgctcatgtgccttctcagacttcctttcgagcttctgcatccgcttcgtgggcgggacggcatcgtccgagagcggctttgcagaggcagtctccgccgcttgagtgagaacggcatctgcatcaacggcttcaaccgcagaggtcttgcgcagcttgtgggtgacaaccgtttcggcaatcaccgtgccggtatgcgaagaaacgccgtgctgctccaaaacagggggcttgaacggcgtttccgagggcagcggttcaggtgcattctggggtggattttctgcccttttctcttctgtgacggacgtttccgaaggcggctgtgtgtcgttatcctcggcgtgttccgcctgaaactgacgatgctgacggcgcatctgcacctttttctgttcctccgcagaaagagcttcggaaggcgcgactgtctcagcggacttcaccaactctgcttcttccagccgctttgacacacgctgctcggtgccagccgtcaggtttttctcgaccgcgccgtctcgcgtcatccgcacgaccaccttgtcgcgggctttgagttccggttccttggacatcagatttcacctccgatccgcttgtaggcaagctcggtgtacgccggattcagctcgatgccgacgaaatgacgccccatctgcgcggcaaccatgccggttgtgccgcttcccataaaggggtcaagcacaatgccgtcttcgggacaaccggcgagaagacaggtctcaaccagcttcggaggataggcggcgtagtgaccgcccttgaaagggacggtgttgatcttccagacatcgcgcttgttgcggagcggattgatgtcagcgtccttgatctcgccatgctcacgcgcgcggttgatggattgcggctgaggctgaccgggaacgggcttgccgtatttgttgccgcctttcatgccgcgcttgaggcgttctgccgttgcaggggcaatcggctcggaaattgccttgtagtcaaagaaatacttcttggactttgagaacaggaaaatatgctcatagcagcgggcgcagcggtctttcacgctctccggcatggggttatccttcatccagatgatgtcgttgcgcagataccagccggtatcgcggagggcaaaagccagcatccacggaatgccgatcatgtccttcggcttgcagccctcaaccttgttgttgagagccacagcctgaccgtttctgccgttggggttcttcgggtcaacaaaatcgccctgattgcctttcccggcgtaggtgtccgaaatgttcagccagagcgtaccgtccggacgcaaaacgcgcctgacttcggtaaatacttccgtcaggcgcgagatatattccttcggcgttgtctctctaccgatctgagcatccatgccgtaatcgcggagcgcgtaatacggaggggacgtcacacagcaatgaacgctgtcatcgggcagagttttcaggatttcaaggcaatcgccggtatgaatgatgtcaagctctatgggtatcagctccttcctttgagagccggacggctcagtcagagaagaactcgtccggctcgtagtcctcatcgagatcgtcaatctcgtccgcccaacggtcgaagatttcctcggcttccttcgccgcctcacgatagaggctcaggcggttcttctcaaaggcggcaaaggcggggacgaacttgccgaactcgcggattgccttcacatcctgcgtgcgcatatctgcgacgcactgaatgatttcggacatcgtgagcagatcgtcgatcatggtttcgtagtcttccttggcgatggtgacggtatcggcatcgtcctcagccgcttcctgcttgcggactcggaacgtctcgtggacatccttcatcagcttgatcacacagtcagtggtctcatcgaaaatctcctgcatacgctctgccatctggtcggcgcagtcctccagttcctcatgaacgtggaggtaggcgcgatggtgctttttcagttcggtttcctcgtggatgagggcaatgagatcggcgctcatgtcgatgacctcaagcagaaggtcaatcggcttggtgatgctgccaaacgtggtgtttacggggacaccgctggcttctgcgatgatgctcttggcgttctcaagattgaagttcttattcatattcaaaatcctccttaattctgtacggtttcttcgggcttggtggtcatgatgcggtagagctgcgtgttcttggggaaatcgtccttgaatggcacgatggttgagccatagaagatcagcccctcaccggcgttggaattggtgatgtagttctgctggctgggcgagatgttcagcgccttcgagagaatctgccggtcaccggatgcctgattcagaaggtagacaaaatccgagttttcaaagatgttttccacctcgcgggaagcaagaagatccttgacgttctgggtgataccggtgggaatgccgccccactttctgaaacgcttccagatttccacgctgtatgcggcggtctgttcctccttcaagagcagatggaactcgtccatgtagtagcgcgttgccttatgctgggcgcggttgatggtgactctgttccacacctgatcctgcacaatcagcataccgagcttcttgagctgcttgccgagttcgcggatgtcatagcagacgaagcggttgttgacatccacattcgttctgtgattgaagacgttcagagagccgtgaacatagatttcaagggcagttgcgatgcgctgtgcctccggctccttctgatttctcagaatgttgtagaggtcttcaaggatcggcattttctccggcttgggatctgcaagaaactcctgatagaccatgcggacgctgcggtcgatgatagtcttctcaaccggctgcaagccgtccttgccgccgacaatcagctcacacatggagaggataaagtcggatttcagcgtcagcgggttttcctcttcggagtagttcgtgttgatgtccagaggattgatgtaatccgtgctgaccggcgagatgcggatgacctgaccgccgagcttctgcacaaggggaaaatactcggcttcggggtcgcagacgatgatgtcatcctccgtgatgaggaaggcgtttgtcatttcacgctttgcggagaaggacttaccggaaccgggcgtacccaaaatcagtccgttggggttcttgagctgcttgcggtccaccatgatcatgttgttggacagcgcattcagcccgtagtagagagcttcgccgccctgaaaaagctcctgcgtggtgaacggcacgaaaaccgctgtgctggaagtggtcagtccgcgctcgatctccacctgattgacgccgataggcaaagaggacatcagcccttcctcctgctggaagtcaagacgcttgagcgcacagttatacttttgggcaatggcggcggtctggaacaccgcgttttcgagcttctggcggttggttgccgtattcatgatgaggatggtcacaaggaacagtctctcattgcgggtctggagatcctgcaacagacgctttgcctcaccgccgaaggtggcaagatcggacgggatgatgtccatatcgtagccggagcggactgcctttttctgctcttcgatcttcatcttgtcgaggtcggtgatcttcatcttgatgctcttgattgccttcgcctggtcaatcgtccggatatgaaaattgaccgtgatgttgctgtccatctcaaggaagtcggcaagcatacggtcattgagttccggcgcgaggatttgcaggaagctcactgcgccgatggttctgcccatcttgaagcacttgccttcacggaagtcaaaggaagtgggcgcgatgaagtccttcgtgctgagtcccgtccgggctaccatgtcaaaggaaaagcggaacggctcattggtgtccatgttgaacacgtcatgaagcactttcagccgctcatagccggacagcggttccgtcctcacaccaagggttttgaagttgttgagaatatcggtttcaatgcgttcgagcttcggctttgccgtgcggagggagtccgcctcaatgccgaaggtgatgtacttcttcttgatcagcccgttgttgcccttggtgagctggttttgcagcataccggaatactcggagcggatgtcgttgaaggcgtcctcctgtgccggaatgttgatgcgcttgcggaactcattgaggcttgccttctgattgatgaaggagagctggacgaaaatcgaactatcaaagtagttcagaaagtcgcaccagttctcaaagatggcagttttgtcctcgttctgcgcaagctggtagttgatgtcctcaaaggcgatggacttcgtgtagaggcggctgttcaccttgcagataccgtcgcggcacatctccacatagggaatggtctgctgggcggacttgcggactttctttgccttcctgtcctttttcttctgcatgacgatccgcttcttttcctgagcggaaagggcatcgccgtaaacgacgccgttcttgacggtcatcttaggctttgcctttgctgtgctgttgttcaagctgcaattcctcctgttctttgattttctgctgaatttcagcgtagagattgtttgtgcgatagggacgcaccttgtcccggatgaacatggactgtacgatgtggtacagatacttttcggcgggctgaccgtccttctcgtaaagcgcgaagaagatgaacgggagcatgatcaccaccatcagcattgccgccgtagacaagtcgagatgcgccttcgccagaaagaagatcgggacgccgaccgccgcagcgatggaaaagcaaataagctgccgcttggtcaggttgaacatgaccttcgttttgacgcggttaagatccttcgggaccggaacaaatgccattgactgtttcctcctttctaagctgcttttcatagcgcagcttcatttgtgcgggatattgatcctccttcggttgacgcttgcccgtccagcgaagcccacccgctttgccttgacaaatccagccggaagcccgaatgcttgcaccgttttcgctttccagcgtgtaggtgatgatgcgcttatagcccatagccgcagcagctcttgccgccgcaccgtagagaaagctgcaagcgttcttcgccccgttggtgcatagccttgtaacctccaatgtgaagccgtcatccagataccggctgacgggacgcccggcgatgattacaccgaccagttcaccgtctgcttcacagccgatggaaaacttgtgaccggcaacaggcttgtgatgccggtgatgctgccggacgtactcgttagcgtcacgaagagaaatgggtcttagccgcagcatggtgtttcctccgtcggaagatgcgctgtgcattcgacctcgttgccccaaacatcccagccttcgggagactgacgggcaaaaagctctacgcggggaaggtctcccatgagccggacaatgcgctcccgcgcttcatccggttttttggaatgctcttcgatatggctgaggatgacctgacgcacaccggcgtcaacacgcttcggatgtcccttcgtagcaaggatgcagatttcggcgtttgcccttgtccaataccccatgccggtgaagagatcatcgttcctgcggttttgcttcacccatacaaaagccacagtcttataagaaaagccccatgccgtcagcacttcgagtgcttcacagaggcacgggaatgtgatccaaaggaacagagcgcagtccttcgcggcaagctcaccgaccggaagcgccttgatgtcctcaatgcacattgtcgggtagtggctttctgccgaccgtccctgtcccttcttggagtaagtccgatacgcccaagggggatcggcgtagatgatgctgtacttcttcatgctgccgacctccttagtgcgcatggaaaatggattttgcgaggcttccggtcttgaacagcgagaagcacagaataaccgtgtacgctgccacagagaacagagctgaatgaatgttgtctgcgatgatcatgccgttgatcagcaccgcatagatgccgacgcagaccatgatgagaaagccctgaaatgccagagcgaacaagcctttcagatagttcgtgccgatgctgccccattcgcggttgctcatggttgcgatgggaataggcgcaatgctcacggtgcagtaaatctcaatcatgcgcccgtagagaatgaccgtaatgaggatcgccatgattttgaggcacaagctgatcagaagagtttctatcgacagtccgagcagttctccgacgcccatgttctccatgccggtacgcatctgcgcaatcgtcgcgtcaatgtcaatgctggtgttgccgtggatgactccggctgcaccggaaaccacgttctgcccgatgtcgaatactgccatcacgatgtcaaacgtatgcgtcacgaggtagatcgccacagccgccttgaaaaaccacttgaagaacatccaagtgtccatgtcgtgaaggttgtttttctcggtgatcatggaaatcagctcgtagcacaaaacgaaggtgatgatgataccagcgatggggactatcacgttttcggatagtccccggatcatctggtacacgccgccgttccagccggacggtgtttgcccaacttcggcggcaatcgttcctaccttctcgttgacatcggtgaacatattggtcaggttgctctcgatccatccgatcagcatatccttgagagcttgttcgatcttttctaaaatgctgcccaatatttcaccacccttcggttaagctgggcttgccgtggattagccgaacaaaccggagagcagggggatgagggtcgtgccgatcagcaccacaccgccgccagccatgagctgcttgatgccctgagatttggcgccggggttgtcgttgccgtagccttccatgaggttgacaacaccccacactgcgagacctgcgccgagggcgataacgagcgtctgaagaaccgtgacagcctgattgatgaaagccatagattttcctccttgatttgaaaaagattggttgtgtatttttgaaaatgggcataaaaaaagaagccccgtcgctgttctgctttgggagccatcaggctttacccactgcgcagtgcagcgacggggctttaatccgcttcgacctcgcccatatcatagaggtcgaatgtgtcatcgggcttgactaccagcttgtgctgccgatacttctcgatgtcaaaggcgttccgcttgtcgtagtcggagagctgccggtactttgcatgcttcgtaatgtcgtatttgttactgagaaaaggtctcacgcctcgaagctgcaaaatacacttggctccgtccatgacggcgatctcatcctgagacatcagttccttgccggttttctggtaattcaagccgtaggagttgttgctggaacgggtttctgaggtgttgtaaaggtcgattgtctccttgcccagcacctcgctgatttccttgagagtcgatttctccttgccgccaagaaaaagtgtgcagtcgcagttgcccgtgatggtgtccgccgcgtccttgtagatggtcttgagctgagactgggactgcaagatgattgacgccgagatttcccggcttcggatggtggcgatgagcttatcaaacttcgggatttgaccgatgttcgcaaactcatcgagcagacagcgcacatgaacgggaagccgtccgttgtaaacgtcatctgccttgtcgcagagaaggttgaagagctgggaatacatgattgctacgacgaaattgaaggtgtcatcggtatcggaaatgatgacgaacagtgccgtcttccggtctccgatggtgtccagctccatctcatcgtagctcatcagctcccgcagctctgcgaatagcgataggtaatcctttgatgttatctccggattttcccccgccctaaaccgggcatgaacctttcagctcacccggcttgccatcaggaacagaatttatttcatctcaataactctcaacgtggacaaggcttcttaacttattgagtttttctttctgcttttggtcaaggcctaggatttccatatactttctgataatatcagggtttgtagcatgaatcaggtgatgtacatcttcacataccaacaccagattttgataattgtccttgccgcctaaataccgtggcactttgtgatggcaatgaatatcgccaatagaaagcactttgccagatacggcgcattttcccatttgggccgaatacagtgaaagcctgttatcgttgtattcgatagtacggtacagaaccgggttcctcattaagtaatgaagaaccgtcatgtcgattctgtccagattcttatggatttcggctctgccctcgggcatataggaattgattttgcggttcatggactttgggggcttgtgccgtatgtagccaatcgggacaactgcgtgtccggctacatatcggagctgtttgcttttcccataccgttccctgataactttcggaacttcacacggaatcttcctttttctgacctgttttgcagttttaacccgttctttcagtcttgcccgcaggctcttgtggacagataaggcgaatggcgtaaggtcatcgcagacctttgtggctaattgatagtagtcatggattcccattacataaacgttgtagcggcaaatcgcctgatattcagtacgtttgccttgtgacgggaactcaatgtcgtaaatcagccgttttaagtttggttttattttcgcaatagatttctctctgatatggctctctactacatatttggcgcgtccgttgctccgtttcccacgggggataacctttaacttgaaaccaagaaactctgaatactgctctttcaggttaatcaccttcgatttttcaggactgatttcaagagaaagcctttcatggagccagcttttggttgcgtggaataacttcaccgcattttgatagctgttcgtgaatatcttaaaatcatcagcgtatcggacgcaggtgacttctttcagccttgtcctccgcagtgcggcaaatttatggctcttgctcacgcttccgttgtaattgaccgattccttgtaagggaactccgttggtatttcttcccattggctggcaagccaccaatccaattcgtttagaactacattggatagcaggggagagataatacctccctgcggcgtacccacctccgggaatcctatcccggccacctccgcttttagcatagctgatataatactaagcagcttcttgtcttggattcccattgtccagagctgtttcagcagttttccgtggttcacgttgtcaaagaaccccttaacatctatgtctacgacatagtggagattgcttctctgcatatttttgtgaacctgggcgattgcgtgctgttggtttcggttagggcggaatccataactgtggtcgtggaatttcgcctcacatatcggctccatgacctgcaatacgcactgttgtatcagcctgtccataatcgtcggtattccgagcgggcgcttcttcattgggtcatttcctttcggaatttctacccgccggacgctttgtgggacataccagtttaatttgcgctgtatggcgcatataagctgttcatcagagagtgctgataattctgtgattgtttttccatctgtgccgggcgtcgtactcccgtggttcttcttgatgttgcggtatgccagccgtatgttttcgggtaatgcaatgatttcaaccagatgtttgaaaactttgcctttattgctgtcggcatacagcttatcttgaattgcctggaagtcataatactcggcgtgccttaacttatctttcttctttgcctttcctgttgccatagtcggttacttatccccactttcgtttggattttcgcctttcttagtcctactcgaacctatgcgtgtttattgaatatgattttgtttctgttcctgactacagcccgtccctccaccgcttactttgttcacggcttcacaggtagcatggctgctctttcctcccggattaagaacggttataccgcacctcccataaaaggcggcacgattttcccgcccattgcttcatcatgcgtatccactccacatccggggctttccacgttccgatattcctatctttgcataatacccttaaccctgccctttaggcctgtatgcctgatggtgcctgtaacaccatagggaatttcatatcgacaaatcttactttaccccacatacgccgttttcacggctatggcatttctgccatatcccgttatagacctgtacattcgggcttttgtcagcggtagtcagccgcattctggacataggtactttatagacctccggcctaacacccccggccacctctggctcggctttgctttatcccccaaaggggacagtcgcgggtgcagacagccgacttcagcgtgctgtgtcagtcgcgggaaatacgtcccgtttcttccaacgcagtatcaagggaagcgtttcagggcgttaccccgccattccacttctcggaatatcagttagaaaggctatagcctttccgtcacttttacctctttgcaggaaaatcccacgcagagtttatatgcgacaacgtgtcgctgcactgtccatcttttgtgtattaaggatgttcaggactatacagggacttgttatgattttgcaaaacgcacatttttgggtggtaaaaaatatatttcggctgagacgtttgcaaaaaacttgagtgaataaaaaaactaactattaaatgttaaatggtagttaaaaaaattaaatttgacctgatatagaaagaggtgattgaggatgtataattttttgattaaatataggctaaagaccggggcgcctgcaactaaatatataactgtaaaatctgtatcggcaaagctggcaaaacagcaatttaatgaaatgtatggttctgccagttttgaaatactgggagtatataaggaggtgagatcaattgtataactggattatacgaatatcgggagcggtggttggcgttgtattgttagttatggttaggtcgcttgagtggtatcccatattttacgcagctccgcttatgatgatacttttggcattttttaattgcgcagaggacacagctgaagaacaacccatagctgacgatgtgcgtaaggtcgtaatcaagccggataatcggcggtgggacttttcggacgcggagtgcagcagggattataaaaataacagtagcaaaagaatacataaaattgtaatgtgaggtgattattataaaaccaatagttatatgtggaaattcaaagtttgacaggcttgttatggactgcaattttgcggctatggcatatatggacaaggacatcaatgaacagtacagagaatttaggctggaggatataaaagtaaagtccggctgtgcggaaccacaaaccggactaaaaaatatatataacaagaaatctatatcaatataacatataataaaagaattgtcaagctgagagaaggagaaaagatgaataagatacaaaatttatcaactaaagaaataatagagcctgatgacagacttacatatgcgctgaaccgctgtggaattgggataatcaacgaaaattctcctgactttgactggtttattaaggagattattcctgagtttttagagcttttttacagcggtaattatgctgaggctgatgagccggaggaagaactgccggactatggatattatgacaagctggacgaagaatatgagaataagcgattaggaggaatataaaatgtcacaagaaaaattgaatactgtagatataaaaggcaagccgtatgtgcttgttaatgagcgagtaaaggcgttcaggaaaaattatcctaattatggattgataacaactatcgtggaattatcggaaaagcgtgttgttatgtgtgcaacaattaacaaccctgacggttttccgattgctacgggttatgcttacgaggacgcaggaagttcttttattaacaaaacttcatacatagaaaattgcgaaacgtccgcctggggcagagcattagccaatctcgggataggtattgatggtagtatgtgcagtgctgaagaattgggaaatgcacttttaaaccaaagtaaaccagcaaaacgtacgaatgaatctatcgcaaaacagattgatgatatgattgatgatgagccgcttaagacaataaatatagcggctgtaaacaccttaaaagcaaagttagatgaatataacaccgtgtgcggtagaaatgctactgaacaggaaatttctaaattttataaatgctccaattttaatgaattcgattacactaattttaaaaattgcataacaatgcttgatgggtcaatcaaaaaagttggagcggataagaaatgagattaaccggaacgattaaagatataagcatgggttttttagacggcgagtgcaaattaacactcgccgtcaatgaaaaaaatgacttaaaacttgcttatgacgaattgtcacaatgtgagttattggacattgaactcaaaaaacaccgtaaaaaaaggtcgctgaatgctaacgcttatctatgggtgttatgtggtaagttggccgataaaataggcgttgataaagaatctgtataccgtcagcatatcctaaatgctaacgtatatcgtgttgcggaaattaacgaaagtgccgctgatacgttaatcaaaggctggcagatgaacggtgttggctggatagccgaaagggttgacaaatctaataaagacggttttgtaatcgtcaatctatattacggcagcagcacatataacactaggcagatgtcaagattattagacagcgtaattgaggattgcagagaccagggcatacaaacaatgaccccggacgaaattgcaaaattaaaatcattatggaaagctgaaagttaaatgaaaagtattatgcaacaagacaaatcgcattgttatatatgcgaaatgagcgaatgcggagaccatttagacaagcaccatatatttggcggtgcactgcgtgatacgtcggaaaaatatggtttgacggtttatttgcaccacaataaatgtcatatattcggggaatacagtgcacaccaaaactattatatcagagttaaattgcaagaaatagcccaaataagggctatggaagtatatggttggagcgagaacgattttagaaaaattttcggttgtagttatatataaaaaaatctcaaaaggagaataaaaatgattaataaagtaatattaatgggtcggttaaccagggacccggaactcagatacacgagcacaaataagccagtatgcagttttgacgtggctgtcgccagcggttatggcgacagccaaaagacggattttataaattgcatagcgtggaacaaggcggctgagttcctcggtaaatatttcaataaaggtatgatggtgattgttggtggtcgaatttcaactcgcacatgggaagggaaagacggcaaaaagaattatgttactgaggttatagcgaatgaactagactttggtgaaacaaaaaaggcgagagatgaatataacggttacagtcgccctaaacaacaaaattcaacacctcaaaaggcggctgatgattttgaggtgcttgacgacttacctaatgacttgccattttaagggagtgtagaaaatggaagaacaaaaagcgtattatgctatcattccggcagatgtgaggtatgatgataagttgccagccaacgcgaagctattgtatggagaaataacggctctgacaaacgaaaaaggctattgttgggctggaaacagatattttgctgatttatataacgtaacaaccgttacggtctctaggtggataaaaatgctttgtgataaggggtatttaacaagcaatattttttataaaagcgggacaaaagaaattgaatgcagacaattgtcaatcactggaaacaagacaattgttcagcaaaaatgctatgaccctattattaaaaatgataataccccaccaatagaaatgttaaggggtgttaacaaaaatgttaagacccctatacaaaaaagtgcgccacctattaacaaaaatgttaaagagaataatacatataataatacatttaatattacatctaataaaaagaaagaaagaagaaagaaaaccgggtatgatgagataatagattctcttgttgaaaatgaagaattaaaagatacattgcgagaatttataaaaatgcgaaagatgattaaggcacctatgacggacaaagcattaaaattactcatcactaaagtttctaaaatgggggacgtagaaacacagattgaaatacttaatcaatcaattgaaaatagctggaagtcagtctatccgcttaaaaataatacgactaatactgtcagcgtagctaaaagcaagtttaataattatacggatactaacaagactaattatgaggaaatagaaaagaaattatatgataacatgttaggggaatattgatgataaaatttacgataagcggcaggctgccgagccttaatgattatatcaacgtatgcaggcacaacaaatataaggcggcggcatttaagaagcggattgacactcagataatttctgagatacgaaaacagcggataggtaaagcaaaaacgccggtatacatagaatttttatggattgaaaaggacagaaggagagaccttgacaatatatactccggtaaaaagtatatactggacgcattgcagaccgccggagttataccaaacgacagtcagaagtacgttataggtttggtggatatggttgcttttgacaaagcaaaccccagggtagaggttacgatttgcgaagaataataaaaaggagaataaaaaatgatagatttaaaaggcaaaaaagtaatagcaagaggaattaattcaggagtattttttggaacattggtagacaaaaatggacaagaagtagaattaaaagaatgtcgtaatatatggaattggacgggggctactaacctaaatgaaatggcaaaatccgggataaaagatatagaaaacagtaaaatatccgtaaaagttgatagtctaatattaacagatatttgtgaaattatcccttgcacggaaaaatctattaagattatagaaggtgcgccagaatggaaatgttaagtgacaaaattaagatattcataaatgatttagactgtgattttagtattggccatgattatggcaacggaaacggaaacggaaacggttgtggtaatggtcatggcaacagcaacggaatcggaaacggaatcggttgtggcagtggcgatggttatggcagtggaaacggtattggcaacggaaacggctatggcagtggcgattgctgtaacaatggtcatggtgatggcaagggatatggacagggctatggctgttattatgtcaaaggcattaaaactataaacggacatgacctgcatattatagataacactctaacaatgattaccaaagtcagaaataatatagccaaaggattcatagttactagagaactacaattaagaccgtgctacatagccaaaggagaaggctattttgcacacggtggcacgttaagaaaagcgtgtgaagaattagaatataaaataatatgtaatttagatacagatgataaaataaatctttttaaagaaaaatttaaattaaatattaaatatcccgtaaaagatttttacgaatggcaccataaactaacaggtagttgtgctatgggacgggataattttgcagaatataacaacattgatgttaaaaacgacaaaatgacggtgcaagaatttataaagttaacccaaaatagttttgggggagacgtaataaaacagcttgcaaaggagatgaaagttaaaattgaaaactaaatgcactaagccgccgaaagtgccgagccctacgttgtgcggcaaggcacctgacgggatagattgttttgtttgtaagtggtatgcaaaaaatgggattgaaaaggaggatacaaaagatgataagtgataaaatagctgattttttatcatacatagaagagcaatgccaaatgtatgatattgccaaagatatgttaaaagaatgcgatgaagctacgcaagatatattacataacatggaaatagacccggttaaatataaagagcgtgcgagactagctactaaattacaatctgtacgccgccaaagaagaaccgcgaaggatatgacagaaacaacaaaaataatatcaatatgggtaaaagataataaatcaattatagggtcattacaacgattattaggagatataaggaaagcagagaaaaaacagcaaaatagaacctatatacccaggacgaatgttatagaggagataaggagaatatgaaaatgaacaaaaaaattatagggatagtaatatcaatagtcttagttatgttaattgcagggtgcacagaagcatcacgtgtgtcctacaatttgtcgcaacaagccgacaattttaacgatgtgcgccaacttacagttattaactgcattcaaggcgatgtattgttccaaatgacgggcaaaatgtcgattaaagcggatataactgacaatcaacttgaagttgttgttgaagaaaatggagagtataaaaagcatttcattggacttagcgacaatgtaacatatgtcgtagaggatataacctccggtgatgtagataagtataaatatacacttaattttaaccctaagatgtggattccaataggtgtagattctattgattgatacagacagtaaataggagaatagatatggaagcaatactgaatatattaacaacagaagatatgacagagttaagacaaggtattaagaatttaattttaaacgctgtagaaagcgaccttaatatgcgagatgaatatatagtatcacctaattttgtcattgatatagtagatgatgttgttgaatatatgcgacctaaacttgaaagaaaagcagaaaaggtaatgactaaaagaataaatgattatttaaatgcaatacagcagacaaaggagaatgaaaaataatgttacatgcagtaaaaatcgaaccggaatattttaataaaataatagaaggtaaaaaaacatatgaaattagaaaaaatgacatggattatgtagccggagattgcattgcactaaatgaatataagcgtggagaatatacaggacgttttatattaactggcattgttagtattgatgaatatcctctatacttagatacaggatatgttattttacaattaagcccgttaggacttgaagataacataaatcatttcgaaagttatgtaaatccagaaagatttaagggggaaaattaaatgaagaaaaaatatattaaaagattaattgaaagagatacgccaaagaaaccatatttagatactgacacattaagagcggttaaacctgccgttagatgtccgatgtgtgattatattttagttctacaaatggaacagttttgtccttgttgtggacaaaggtttgtagagaaaaagaataaataatattatttaaacaaaaaaacgccctgcatatgcgaggacgctcgaaaaataataaacatattatatcacataatagtgataaagtcaaggagtgttaattaatatgcagggtgtgactatagaagaaacaaaacagtggttaaatcgtggttataaactacgagagacgataagaattttagaaaaagcgcaaatgcgcgcttatgacatagtgacgggtacgacaataacactatcggaaagggtacaggaaagtcacgggaatggaacagagaataaattaattacatacgcagattactgcaggcagatagactgtcataagacagatttatttgaaatcttgaaacaaataacaaatgcaataatgaaagttgaaaacaacatctataaaaacatactcatatcaagatacattaatttcgagacatgggagaatatatcacaaaatattggatattcatacagacaaatactgagattgcatgaaaaagcgctacgaaaagttaaagatgtccttgaatgtcacattgaaagtgtgatatagtgtataatgtaggaaataaaaaatttctcctttttaaatttttttctatgagccgttaccttatggggacggctttttatattgcgattttaggtcttgtgggaatgatacatcataaataaatgctgaggggtgggcggctgtgatgttaatggaggtaattaattgtggaaataatatataaatcaacaaaagaaattaagccatatgaaaataatccgagaaataataatgaagctgttgagaaagtagcagttagcataacagattacggatttagggtgccaattattattgatagtaataatgtaatagtcgcaggccatacaaggtataaagccgcgttaaaaataggctgtgaatctgtaccatgtatagttattgatgacttaacaccggagcagataagagcatatagattggtagacaataagacggcagaatattcaagttgggattttgaaatgcttgaaaaagaattaaaaagtttagatatagatatttcagaatttgaatttcctgatttgggagaaacattggatatttcagatgatgatttttatacagatgagacagtaaaaaatgttaaagtgaaatctattaaatgtccgcattgtggagaaacttttgaactatgaaaatatatcttgctacatcaagtagtggtgtgaaaaaagaacaaagaaaagaaatgataaaatgttgtagaccattatatttactagagactttttattcaggcgaaaaatgttgcgcaatggttcagaatgatgttggcacggataattttcttcttgacagtggagcattttcatatatgaatggaaagtctataacagaaaaacaaatggaggaatatatagaaaagtacatctgccatataaaaaaatacaatgtaaaatacttttttgagatggatgttgattgtatatttggtcttgaaaaagttgaaatttggcgcaaaaaaattgagaaccaaactggtattaagtctatacctgtgtggcataagtcaagaggtatagactatttcaaacgaatggtcgatgaatatgattatatagctataggtggtttcgcaaatggtgatataaaaaagacagaatatccattaataaacaaaatgattaaatatgcaaatgtgagaggaacaaaagttcatggtctcggctttacgcgaatgaagtatatatatgattatccgttttatagcgtggatagttcagcatggtgcacaggtgctgtaagaggaggacatttatattattttgacggtaagataatgaaatatgacataataaaaaatgggaaaaaattaaatctatctataatggctatgcggtcattttcagaatgggtgaaatttcaaaaatatctaaacacaaggagagtagtatgagaaaaacagaaaagaatttatcaatattaacaatattgtttgtagtatcattaataatttcaaatgtaataacaggtaaaatcattaataccggtattccgttttggggttcagtgataacgataccctgtgcggttttatgctatcctataacatttttaattacagatgtagtcggtgaggtttgggggaaaaatgaagcaaatcatatagtaagattaggacttatttcacagatagctgctacgattataattattattgggaaatatttaccttttattgacgcagaaatgcaacaagcatatataaaaatattaggacaaaattggatattcgtgattggttctttaactgcttatctagtaagtcagaatcttgatgttcatatatttcatagattgcgagataagtatattaaaaaacatggcagtacaaaaggtggtcgctggatatggaataatgcaagtacaatgacaagccaatttgtagacacattaatttttataacgatagcttttggatttggatttggttggatatttaacaatcagattactctaataggtatgttgatagggcagtatctaattaagttgataatagcggcacttgatacgccgtttttttattttctgacaaaaaatataaaagaaataaattaggcagtgtggggtgctggtaacgccccacacttacgctagagcacctacctctaacgcagatagcccttctcggccgagattgctacctgcaccattatacatgatttagaggtgcgatgtcaaatggaaatagataccaaaataaaagaagcgttagaaaaacgtgcttatggttttgaaattgaagaaaaagagtttataaaaaataagaataatgaaaatactgggagaataaaagtaacaaaaaaatatattcccccggatgtaactgctttaagaacgattttgcaattaaagcaggcagggaaatggtgaggttatggcaaagggcaaatataaaaaatggttgaaacctgaaaatttattattaatagagggctgggctagagatggattggttgatgagcaaatagcgcataacatgggtatagcgtgttgtaccctgtatgagtggaaaaataaatatgcagagatagacgagaccttaaaaaagggtaaagaggtagtagatttagaggttgagaatgcactgcttaaacgagcgctaggttacatagtagaagaaaagaagattgaggagaatggtataggtggagaaaaaactataactactataaagcatatacctggagatactacagcacaaatattttggcttaaaaatcgtaagccaaataagtggagagataaaccaacaacagaagacaatacacaagaccaaaacataattattaatattagtccggctacaacaaacgatatggaagatagttatggagattaatttaaaagtcaataaggtatatataccttatttacaaaaaccacaatttacacagatatattacggcggttcctcaagcggaaagtcgttttttttatgtcaaaaaattattattgataatatgaatggttgtaattggcttatatgtagagcggtcggcaaaagtattaaacgttcagtttttaatgaaatctataaagctattaattatatggaacttagtaatttatatagctttaatttttcggatatggttattacaaacaaggtaaatcaagcgcaaatagtctttgccggattagatgacgttgagaaattaaagagtataacaccacgaaagggcgttatagaacgaatatttattgaggaagctacagaagtcaaaagaaatgattatttgcaactcaagaagcgtttgcgtggaccgtctaaaataagcaaatgtattgttatggctttcaaccctattttcaaattacattggatttataatgattttttcgacaataaggttgaagacggttgcaagaaatatgaagataaaaaagtatctattttaaagactacatataaagataatatatttcttacaactcaggatatagaagcgttagaagacgaaagtgacccatattttcacaatgtatatacattaggcaattggggagttcttcaaggtctcgtatataagaaatttgtagagaaattctttaatgtttacgaaattagcaaaagacctggagtagtatcggcgtttggacttgattttgggtacacaaacgacccttcagctttattctgcggattggtagacgaaaaaaataaggagatatatgtatttgacgagttatacgaaaggggactgaccaacatggaattggctccaaaaatacaactaatgggttacggcaaagaaaaaataataggtgacagtgctgtacctcaaacgattgaagaattaaggcaattaggattatcaaggatagagggagcgtacaaacatgaggttatgtacggaatacaaaaacttatgaatttcacctttattatacaccctaaatgcagaaactttataaacgaaattaataattactcatacgccgaaaaagacggagagagtatcaataaaccaatagataagtttaaccacttaatggacgctatgcgatatgcggttatcccgaaattagagggagatgtatttagctttaagtagcaggaggataaaatgtttaatttttacgaagaaacgcagagaattattaatattatatcaaaaggcgcaaataaagcgccaactatgaaaagaatagcggaaatagaattaaataaatataagcagagcaaaaagcgtaaaaaaatgcttacaggaataaattattatgatggaaaacatgagatactcaaaaaaaagcgacttgccattgaagagggcggtcaggcttccgaacagcactatttgcctaattctaaaataattaataatcaatatcgcaaagctgtagaccaaaagtctaattttctttgcggtcgccctatagcaattgacacggataacgataaatataccgacgaacttaataagatatttgacgaaaattttcatgcaatacttaaacagacggcaaaaaacgctttaaattgtggtatatcatggctatatccgtatatcaacgatagaggagagttttccgtcaaaatattctcaggtattgagatattaccattttggcaagatgaagagcacagatatatagatatggcttgcagattatatgttatcccaacatatgagggggaaaacgaaaaagatgtggagcatgttgatatattcttgcctgaggggattgaatattatatatatgaaaatggaaaattagtgattgattctgagcgtgaacctgaaccatatcttacatacaaagataaagatgataatgttatatctctgagttgggataaaataccgctcataccatttaaatataactacgaggaacaaccgcttatagaaagggtacaatcaatacaagacgcaataaatctaataatgtcaaattttgaagataacatgcttcaagacccttataatactatatatgtattgcttaattatgacggtgcggatttagaagaatttcgacataatattgcgcagtatggagcggtaaaaataaggtccgttaatggtattgatggaaatgtaagcactatagaagtaaaggtggacagcgaaaattataaagctatcctagaccaattaaaaaaagcgttaatagaaaacgcaatgagttatgatgcaaaagacgacaggcttggcggtaatgcaaaccaaatgaatatacagagcatatataatgatattgaccttgatgctaatggtatggagttagaatttcaaagagcgttaaaagaattattgtggtttgctgatatgtatttatacaatactacaggtcaggattttacgaacgaaaaagtaaaatttgtattcaaccgcgatatgatgatgaacgaaagtgaaataatgacaatgcttcaaaatttaggagtgcaaatttcacaaaaaacattaatttctcaagtgccttggatagatgacgttgaaaaggaattgagaagagttgaagaggaatacaatacaacgaacaacgatgagtataataacttagtcaatcagatgagaggtgaaagcggtgatttaggaaatgccgaagaatgaaaaaatagaaaagttacttaaacgcaacggcgaatattggtcggggcgttttttgtatcttgaaaaagtacaaagtaataaaaatatagaatactttcacaatcttgaaaaacagtacaatgaagctgtgcagacggtaacaaacgatataaataactggtatatgcgatttgctgaaaacaataaaataacatttacagaagcaaaaagattattaaatgcaaaagaacttaaagaatttaaatggactgtggaagagtatatacagaaaggcaaagaaaacgccctaaataaacagtgggtaaaacagcttgaaaatgttagtgctagggtacatattaatcgtctagagagccttagaatacaaatgcagaatcaggttgaggtattaatgggtaatgagttagatgatataagcaatcttataactgacatatatcaagatacctattatcgttctatttttgaaatacaaaagggttttggagtagggagcagctttgcaaaattagatacaaaattaattgaaaactatatacataagccctggacacccgacggcaaaaatttcagtgaaagaatttggggtactcatagaccccagcttgtgagagaacttgaaacaacgttaacacagtcagttatcagaggggagcagcctaaaaaaatagccgctaagatagcaaaacgatttgaggtgaagaaacatcaagccgaaaatcttgtattgacagaaacagcatttttcaaatcaaaatctacattggacggatttagagaaatgggagttaaagaatatcagaacgacgcaactttagataacaaaacatctgatatatgccaacatatagacgggacacattttttagtatccgagtataagccggggattacggcaccgccttttcataatcgttgccggactgttgcaataccgtattttaacgatgaatttacggtcaatgaaacaagggcggcgagggacaaggatggggatatatactcagtgccgggtgatataaaatatgcagaatggaaaaataaatatgttgaggattctatatcagataatgaccgtaagttatttaataaatatgtaacaattctaggactaaatgcgcctactattgacgaatttgtgaaaatgaggtataataaaaaagagtggggacagtttacatcttattcgagttcaataaaatccggtgaattatctcctttggctacatttgaattatataaaagtatcagcaaaaaattgatgataacttaataggcactattacaagcaatggaataaagataacagataaatctaagcattttatatcaagagtaatagggtcggttgagcagaggcgtaacggcgtaaatgtcaaagatgtattagacgtgcttcaaaatcctgcaagattaggtgatattagaaagttgaagaatggaaaaagccaaagatttattggcgacttattaacggctactgttaatcctgataccggagtgttaatacaggttaacccaacaactagaagaaaggggtttaagtgatgaatattactgaaaaacaaaaagaacttgtgaaaaaatatttgaaaaagtcatatactgaaatatatcaactcctgttagatttagatgataaaataacagaaattggttttgatgagaattacgacattaacgaagagggcatattattgcaaaggctatatgatgacctctattatcaaaattctgaaatataaataagctccgatttatcggagcttttattatgctttaaaacagaggtgaaattatgattaaatgggcgttaccgattttacaagtagtctttattatctgcaaggtgttcaatttattaaattggagttggagtatagttttcataccgagttatatttggctgactgtattctttatattcctagttttctgtttaatatttatatatttggggggcaaaagatgaagtgcccgtataaagataatagatttgaaaatacaacatcaaaatatatctatgacgaagacggaagtctaatagaaaataaaataacgacgtgtaccgcttctacttttggaaagtgtgacggcgaagagtgcgcagcatataaagatggtgtatgtcaatatgtattggtcgaaaagggaggttgagagttaatggcaagagagccaactggaaataaatttaataatgattgagccgcataaggctctttttttatgtgcaaaattcgtctttttggtattgcagacgtaaaagaacaagactgatagccgcggactataccgcgtataaaaaatgtaatcaagaaaggtgtagtgtttaatggataaagcatttttaaaggagcttgggatagaagatgaaaatataacaaaaattatcaaagctcacaatgaggaaataaaggacagttatgtaccgctttcccgatttaacgcagttaatgaggataaaaaggaagcggaacgaaaagcaaaagaattaaagagccagctggacgggttggacaatgtagatgttgcggaattggaaaatacaattgagacattaaagaacgaaaacaaaaccgcacaggaaaatcacgaaaaagaacttaggaatataaaaattgattatgctcttgataaagctttgatagacgctaaagctaaaaatattaaggctgtaaaggcgttttttaatttagatgaactagaacttgataatgacaatatcaaggatatagacgataaaatcaaagcgttagcagaagatgatacaacaagttttcttttcggttccgacgaatcgagcaagggtaaatttaagggtgttaatcctgtgcaagtaccaggtgccggaagcggtcagtctgacgatgatagtgtaggctcaatgtacgcacaaaaatataatgctaaatttggcgttacaaataacgaaaatgaataggagtgaaagtaatggctttaacaacaataaaaagaacagaaactagacctaactttttagaatcggaagtaggtttggtgcttaaaacggcacaagtagacaacgcaaatattgaagctgatgaatatggatataaaacggtgaaaggcggtacaccttatccagcgaatgattcaaccgcaaaaggtcttatttttgaagatgtagacgtaactgttggctctgacaatggggtaagaccggccagcctaatggttgcaggaagagttttagaaaatagactgcatactccgttgagttcggcggcaaaaacagcacttacagcattggggtttgtttttgttgacgaacctgtaatcatgagagaaccaattgaacccaaagagtatacagcaggaacaaccgcgttcagcggtagcgatatagcctacggaagtggtgagctaacgattactgctattgatgacagcaacactgattcggcagtagctacagttgcattgtcgtcttcaactcataaggttacagcaactaaggtaacggcaggtaatacaacggttgattgcactgtatcagacggcacaaatacagctgtgattactgtaccaatagaattagtataggaggactataaatgaatattttacaattaatttcagacaaagacagattgtcattttcgcaaaatctgtctatacagagaaactatttaggggacactttatttcctgatttgaagacacagcacttagaagctgagtattttagactgactgacggtcttaatctgccaacaatggcgcaagtacatggttttgatacagaagcggcaataggcacaagaccgacgttagaaaaggtaacaattgagaaattattgattaaagaaaagattaatcagtctgaaaaaactcgaatgtatctaaagaccggagtatctgagcaagcattggtttcatatgtatttgacgatatgggtcgtcttgctgataacgtaaaaacaagaactgaagtggcaaaaatggaagcgttatcaactggtaagctgacagttaaggaaaataatcttgattttaccattgattatggagtgcctaaagaaaatagaatgtcagtagattggagttctcccgaagctgatattttaggggacatacggtcaatgattgatattgcgaaagaaaacggtcatactgttaacagatgtgttgcaagtaataagatagtaaccttgatatgcaaaaataaggcagtacagacggctatgtatggtgtaaatggagttggaacttttgtttcgctcggtcagcttaatacaatgctcagtaatatgtttggctttacaataactgtaaacgatgatagatacagatataaaatcacaaaagacaaatacaagacaaagcgttatatagatgaagatgtatttattttatttcaaagtctagacggttctataggtaccggactttggggacccactcccgaagaggaggatatgggaccttatacagaaaagtcaagtcagcagtatattaccttgacacagtgggagacaccagaccctagagcggtttggacaaaagcgagcggtgtatttattccggttctcccgtcccctgaaagcctgattataagcaaggttaaattagcgtaaacgaaagggggaacggatatgttagaagaaatatatgcagctcttgaaagttatggttacaacgaatttgacggttctgatgagatgattataaatcttattattgataatgctgaacagcatataaaagggttttgcaacatttctcaaatacctaaggacttaaaacatacattcatacatagcgtatgtggtgagttcctatatcaaaaatataatagcggaaatttgccggatagttttgattttgaggtagcgtgttcgtcaattttggaaggagatgtaaaacttgatttcaacattaacggaacatcaacagcagagcaaagatttcttaaaatggtaaacgaactccgttcccctgattacaattgcttgataagacatagaaagctggtgtggtaaatgaggattaaaacgccaacagctatccagattcagaatgcaattacaagcatgtggaacggcagaatgaccgtgtacggaaataaaagcgtgtttaacgaagttaccaaaataaccgaaatagaaaatgatgtagtcttagccaaagatataccatgcaggatatcctttaagacaatttcaaaagtttctgaacaggacggcgcatttaaaactgcacaggaaataaaacttttctgtgcccctgaaatagaaatagcggaggggtcaaggcttgttattacccaaaacgatataacaaacacatacgaaaaaagcggcacaccagcaatgtacacatatcatcaagaaattatattgtctcttgtagaggagtgggtataatgatacgctgtaattttaatgatttaaaagtgtttagggataatctagataaattaacaaatgcagaatatgacagattagcaaaagaatgttgtaatgaaattgccgcacgactgttacgaatgacacaaaaaaatacacctgtagctactggcacattaaaacgtgcttggaatatagagccggcagagaagaaaggtaatgtgtgggtatctgttatatacaatacagctgattatgcaatctatgttgaatatgggcacaggacaaccaatcataaaggctgggtaaccgggcgttttatgctgacaaatgctgaaaaagaaatagaaaggattgtcccacaattgctagaaaaacggttattgcagaaactaggtgaagtatttgactaatgaaacaattgcaggaatatcaaataagttgtatagcttgtttggagaaaattataaaatatatactaaggaaataaaacaggacttgaaaaagccctgtttttatattgtcaatttatctgtcagaaacagggtttcactaggtttgagatataatcacgaacagtcatttgatattcatttctttcctggaaaatcaggcagtcagtctgagatgtcagagattgcggataaattgatgacaaaccttacatttattcaagtacaggataaaagttatttgtatgggtctaatatcaactcccagattgttgaggatgtgttgcatgtttttgtcaattatgacgtgccgatgaaaattgttaagaccgataatgagtatatgaataatttagaaattaatggaggtatgaaatatggcaattaaaaagccggatgaaatggaagtaaaagacaaatataataaatccgttattttgcagtctgcaaaatacaaaaatagacgtgatttgcttgatgtcttattagatgagaagaaatactatacaatttcggaagttgaaaatgcaataaaaaaatatatgaacggaggtagaaaataatgttaggtggaggtactttcacgactatgaacaaagttctgccaggttcatatatcaacgtaatatcaactggcaatgcgacggcggctttgtctgatagaggttatgtagccgtaccaatggagcttgattattctcctgaaggagtttttgaagtaacagctgcggattttcagaagaattctgtaaagttgttcggctacgagtacaactcagaaaaaatgaaaaatatacgagagatattttgcaaggcaaacactgtgtatttttataatatctgcgaaggcggcaaaaaagcaacaaatacatatgctacagctaaatatccgggcgaagctggaaatcaatataaaataaaaattgaagaatcggtagatgatgaaaaccgtcttaatgttttgacaatttataacagtacggttgttgatgttcagcaaatagaaaaaattacatcagcaagcacagaaaacaacggacttgttgataatgattatgttgattttaaaaagaatgttgtaccaaccgtaacatctgggagttctttatccggtggtactaagggaacctcgtcaggagccacaatacaaaaggctttggattcgttagaatcttattcgtttaatattcttatttgcacattgacacagacaacagataagagattgtatgtaaactatgtgaagcgattaagagacgaaaacggtattaaatttcaggttgttatacatgacccagaaaatgaaattccggcagattatgagggctgtattagagtgcctaacaaggtcgctgacggttctgaatctgcgcatgaattagtttactggacaggcggagcagaagcggcgtgccgtgtaaatggctctttaacaaatgttgaatatgacggggaatataccgttgacactaattatacacaaacggagttatctaactttattcagtcggggtttttggcgttccatagagttggaaacgaaacccgtgtgcttgatgatgttaacagtcttgtaactgtaaccgatggtaagtcggaagattttaaacgcaaccaaactatacgggtaacagaccaaatatctaatgacatagctgttctttttaacacaagatatctgggaatatcaccgaatgataatatgggcagagcctcactaaaaaatgacattgtgaaaatacacgaggatttgagaaatataagagcaattgaaaactttgcatcttctgatgttacagtcgaggcaggagataaaaaaggttctgtaatcgttactgatacaattacaacaattgaagctatgagacagttatatatgactgtttacgtttcgtaaggagggaaaataaatggatgaaaaagactataacatagcaaataatgtggtgatgaaagctaaggacagtttgcaagctaatttaggaaaatgcaccataactaatggcactaagcgttataactttatgcaagcaattaatcttgaagccaactttgaaaaaacaaaagaagaaattccgatactcggtaaaacaggtaaagggaataaatctacaggctggaaaggaacagggtcagcaacatttcattataacacttcaatatttagggaaatgatggctgattataagaataccggaaaagatgtctattttgacattacaattgaaaacggtgacccaacgtcagacgctgggtatcaaatagtaacacttaaagactgtaatatagacggtggtattctagcaaaatttgacgctgacggcgggtatcttgatgaggatatggacttcacatttgaggactttgagattactcattcttttactgctttgacaggatttttaataaacgataatagcaacaacaataacaacaataatagcaacaactaataataggaggtaaaaagatgggaacattaaaagggtttttgaatcctaagaaggttgaaaatataaaattcgtggtgagcaacagattcgttgatgatgacggtaatccgttagaatgggaacttagagcactttcggcaaaagaaagcgaattgctgcaaaccgattgtatgataaaaaaagcttccagcagaagaggggtgtcaagtcttgatttagatgctgctttatacacaaagaagatgatggcaaaatgtgttgttaagccggatttgaacgagattgacatacaggacgcttacggcgtttcttgtgcggaagatgttttgggaaacatgttgacaagcggagagtacacagccctttctaacaaattattagatgtaaacggttttaatgaaatatttgaagatgaggtaaaagaagcaaaaaactaataaaaggtggagacgcagacagtaactatgcttattactgtctgcatgaactccaccttttacctagagaatatttaaatttgtcccgaaaagaacaggctttcattgcggcgtgtattgagataaatcaggaggagataaaaaagattaataaaaagaacagtaaaaagaaataaggggtggttattataggaaaaacaatgaaaacagcaatagaaatacaggataaagttaccgcacctattaaatcaatgtataatgctatgaatcttcttatttccggatttgagagaatgcagaatatgcctggaaatcttgtagatacaaagtcaattgccgctgcacgttctgaattaacaaatgtaaaaacggtattgagcggagcagaaaagggcgctaaaaagttgaacacagcgtcaacatctgcaggaaatgctgttaagactattggtcaatcatcagctaacatatccagagtttcaagttctatgaattcagctgtaaactcaaccaaaagattttctacagccacaactcaatctattcaaggattaagaggtcttgtgacaagcctaacaaacgcaaaaaataaaattgtaagcgcaacaactactggtatatctaaatttaaacaacttgcaacatcaatgaaagaaagttcctcttctggtaatggtctggttggtgtgttaggaaaagtagcggcggctgtaggctctgttatgggagtaaaacaaattatcggcttatctgataccatgtctcaaacaaaggctcggcttgatttaatgaatgatggacttcaaagcactaaagaattgcaagatagaatttttgattctgcccaaaagtccagaggttcatatcaagatacggctgacctagtatccaaacttggtctaaatgcaaaagacgcatttgaaaacactgcacaaatcgttgattttgctgaacaagtgaataaacaatttgttatatccggtgcgagtgcggaggaaacaaaaaatgcaacattgcaattaacacaggcgctatcatccggagttcttaggggcgatgaactacgcagtatatttgaacaagcgcctacattgattcaaagtatagcgaattatatgggtgtgccaatagggcgtatcagagatatggcagcagaaggacaaataacagctgaaacggtaaaaaatgcactattagggtgtgctgatgaaacaaacgctaaatttgctagtatgccattaacatttagtcagttgtggacaaattttaaaaatagagctatgcaagcgtttcagccagttcttgaaaaaataaacgagcttgcaaataacggaaagctggaagaatacataggtaaaatagctgaagcaatggcgatggtcagtgatgtaattatgaacgtcataacatgggtattagaccatcaagatatagttaaggcggcttttattgggctttctgttgctattggtgcaatgactgtagctatgtgggcttttaatattgcttcatatgccaatccggtaatctggattgttttggctatcatagcagttgtagccttattagtggctgggatagttttagtcgtcgaacattggaacgaaataaaagatgcggcaagtgcttgctgggaaggtgttaaaagtgcttgggggaatgttacagatttcttcaaaggaatatggaatagtattgtttccagcgtaacaggtctgtggaataatattgtttcgatatttacaacgataaaaaatttttttgtcggcatttggaacagtatgtatactgttgtttctacattttggggtgctatatggaatactatttctccaatagttatggctatatggaatttaatcagtacgatattcactataatatggacaataatttcaaccataatgcagggaatatttcacgtaataagtaatgtgtggaacgtaatatataacgccgtttcaggggtgctaatctctatatggaacattataacaagcatatggaacagtatatacagtgccgtctcaggcgtattgtcctcaatatgggatgcagtgtcgagcatatggaacagtatatataatgcaatttcgggcgtattaagcagtatattcagcactgtttctagtatctggaacagcatattctcagctgtaagaaataaggttgttgaaatatataacaatgtcaaagacaagtttacggaaatacttaattatcttagtggtttgaaagataaatttttacaaaaaggacatgaaatgatagacggtcttataatgggtattgcggataaaataaacggtgttacaagtaagattaaggagttgggagaaaaagcggttggggctataaaacaattctttaacataaattcaccgtcaaaggtaatgcgtgaactcggtaactttacatttgagggatttaatcttggacttgcagaccaaataaacgctatcaaaaacacatcacttaatatgggtgcagtggttacggctaattcaatgcctgaccttaaagcaaatctggactattcaggaaaaaaagatttcagcgcaatgcgtgagactatagctagtaatactactaacagtacatatattcacgctcctgttactgtaacccaaaagaatgatattgttgttcaaaatggcgagagcactgataatcttattaagaaattatcaagaggaatggaagaaaacgcagaaattgtgtggaaaggggtattagcataatggcttattctttttttgtggcaggaacaaaattaccagtgccgccgtcatcctttacaactaaaatcgtaaataaaaatgagacgtatgaactagttgatgacggagaaataaatattattaaaaaagcgggattgaaagagttttcatttgaggttgaattaccgtgtacagaacgtccatacgctaattatgaagatggttttcttccgcctttacattatttagaattatttgcatatttaaaaagcgaattattaccgttccaacttgatatttatagagaactccctagcggtgaagatacatattacacgaacgaaactgtgacactcgaagattatacagttaccgaggaagcgactaacggtcaagacgtaaaagtcgaattgaattttaaaaaatatagacagtattcaaccgctaccgttatgcaagatgaagacggattgcattatactattgtccggggtacagataagcgaataaacagggttgtagatgtgaaagacggtgacactttagccactatagctatgagagaatttggacgggcagaccaaaatttgattgattatctatacgctataaataaagaaaacatagatgctgaatgtgcaaaaaggggagtatctccaccacagatattccccggtatgtctatacgacttactgacgacagtttcgggaatatcgatgaatacaacgccaataacaatgttggcgataataagttacaggttgaagacgtaaacaagataactgaggagggattaacagtgacacaatacgaaagtataatgcagactgttatgggacatcaaaacagattaaacgctatgagcagttatatgatatataactatgttgataagaatatgccgaaagaatttcggccaatagtaagatttttaaattataagggttggttaaaaggagatgacagcggagaactcggtttaactgatgatatgcttagaattttagcggctcttgcccgttccggtgcttttggtaatgactgtcctacccctgaagatgaaaaagactggggggattaatatgagtgtttgcagagtgtacattgaccctctgagagattacagcggcaataatgcaggagcttcatattttggagtgcgtgaacaagacatgaactggtttgtggcaaaaagagtttctgaaacacttgataattacacatttatgaactcacagaaatattcatcttttgaaactcatttaagccgggaaacaaaagaaactacgaaaagtgaagatatgtgggagagcttgcgtatacgtctgaatgagagtgaaaagctatgggacgatggaggagagcagacaccttattacatttatttggggataggctctgaaccgtccgggaataaagagaccagtacagaaagaggtataagctgtcactatgaaaagagaaatgcaccgggtattgataacgatacgtggaacgcatggagctatagtttagctgatactatacttaatacagttgtgaaaaatactgatatgcctgaatataaaatacctataacgctgacaaggtatctgccaataaatgaaaatgaaaaaataatgtgcggtgttacggctcacgtaggacgaataaataatgcaaatgacgctagattattatacaacgaagagacaaggaatgctatagctgacaatatagcggaggctatagcatattgggtagaccaggattacacaagcgggaacgtgcctgataaatataagacaccatatacagccatagataacgccaaagacagggcaaaggcagttcttgccgaaatacagaagaacgaggaattattgtctgaaatagaaagccgaatggtatacaattacatagataaaaatttcccgtcttatgctataggaaccattgaatatttaattgacaatggatttttaattttaaaaggagacgatagcggagaacttgggttgactgatgacatgatacgtcaaatttgtatttttgcccgagctggtattttcggaaaagattgtcctacacctgaaaactatatcccgttatgataaatgtaattgacaatattttcctcatatgatatattaattacaatatattatatgggaggtaattttttgaaaaaatttgtttgcggattattgattggtgtaattataagtggtttagttggagtgtatgcggtaaatcaaatatacgataatccatattcgatatatgttaacggagagcaaaaacagatacagggttataatattgacggttatagctattttaaattaagagatatagcgcaggcaacgaataagttcaatgttgattttcaaaatgataatgtaattattgatacgtcaaaagggtattcagaggagaataagcaaccggaacaattaaaaatagatgaaaagaaaatatattgtgattatttaaataatgttgaaaagattgaagttcttaatcatccggcaggtgatacaactgaatatattagtgtaaatgatttattatattatatgactgatgttaataacgacggggtgcaagatttagcgttttcatcaaagaactatcctaataatgggttaggtattttaactatagataataatagggttaccgaacttataactccttctattattccttatagtgctggttccgaaacatgtactttagctatgtatgataataaatatgggatatttaaacatagggagaattcagctgatgattttgtttttaccactattgttggaaagagtaaatttaatacaactttaagtggctatcatcatgaagatattggttatataattaacaatgaaaatgttggagaattaaattggtggtcgatatttaacaatattattccagtaaaattttatggttttgattctcttgtatctacttcaagtgagtattcaggggaagagccagacgatattatatattatgattatggaaataatagttgggctcctgattatggagcatattctggtttaaaatatgggataaataatttagaatcaatcattgattacaccgaaaaacaattagtttctaacagcagtgttattacgtatgaatatgtatataatgaaaaacaaattaattcatatatagaattattaatgagtattgggtttagtagaagataccttgaaaatgacttgtttgtatatcaagaaaagtttcctattttaatgtataaaaaaagtgatatagtgctatcaaaaaacggtaattatattactataaataattctcctgattatgaaaaggtttttgtttcgacttctcccggtaaaagtccagaagatataataaaagaggctcaaaataatatagataaactttacttataatatatactataaataaatatttttcaagacaccttagagggtgtcttttttattgaaaaaagaggtgaacaaaactggctacggcaaaacagttagtagaaatcgcagaaaaggaaataggatacactgaaaatagcggtgtatacaaagagtatgacagtaccgggcaagcgtggtgtgcatattttgtttcttggtgcttaaaaacagccggaatcagtgtttatggaactcaaggcgcagcggcggcttttgcatacatggcagaaaatgagggaaagggtacatttcacggtaaaggaagtggctattcaccaaaaatcggggatttgtttttaaaagattataacggggttgattgggcttcacatataggaatagtaagaacggacgccgcaaatggaagtttctcaagtgtggagggaaactctagtaatagtgttgcttctaatacccgcaatgtttcagattattgttatgtgacaccgccttttaacggttctagtgttggtgctgctcccttagctccgcaacgtgaaatagttattgagttgcccggcggtcttggaaaaatatatacatatgaaacgtggaaccgggaggaacatggatattctgcatggaattctgattctgcgcaaaagaaattgataaccgtttcaaaacagcgcaatgaatacagttttgacggtgagggatatggatttgtcggcaagcgttatgttgtagcaatgacaagcacattcggggatattggtgattatgtagatatttattgtgccgacggtagggttataaatgctgtaataggtgatgaaaaaagtcaaacatatgaagactgggacaataatccggctaataaatggggacatgaaaacggtcaaattgttgttgaatttttgacaaattggtcagctaatccattgcatgaaaacccgtcgtcaaatggtggggttttaaaagttatcaatctaggaaactattttaattatcccgaatatgctattggatttgacggaacgggcggtgtcgctgacagcaatagcggtaaaagtataacatcaatacagactatgtcatatataggcgccagtgtagattttagagaaaatcctcttaacagcaaaaaaatgttaaatcaaaataatatagagttatatatatcaggagcagaaggagttatatataaaccggttgtagttgatgaaataacgtgggaaacagaagcgtacggaagtccggcacagcttgaatttactattatcaaggatgcgtatatatcttttgaggagggtgaccaggttatatttaaatataagggtgctcctgtattttacggttttatatttcaaaaacagcgaacaaaacaacatcatataaaagtaactgcttatgaccagacaagatattttaagaatagtgactgttttgtatttgagggctgtacagctacagaaatagtaaaatctatttgtaatgattataaaatagcatatggccaacttgaagacacaggcgttaaattgccccttacagtttgcgataatattcaagttttcaaaataatagaggatgcattggattatacggtagcacaaggcggctatcgttttttattgtgggataattttggctctttagttttggctcctaagttttggtacaaaaaaaattatgttgtatgtgattttaccgcccaggattttgattatacaacaaccataaatgaggggacatatacaagagttaagctatattatgacaatgaccaaacaggtacaagagaagtgtatatcagagataaatctgtcgaatatcctaaatttggtgtactgcaatattgcagtactcttgatgagggggaagacggagtaaaaaaagctgaggaaattataaaaattaccaccaataaaataagaaaacttgatataaaaggagcgttaggagatgtaacggtaagaggaggaactcaggtatatgttgagcttaatttaggggacataattcaaaaaaagtggatggaatgttttagtgcaaaacacacatttaaaaatggagagcattttatggatttacatttagtaggagggcaatttatatgattgatataacggaatttacaagggcggtaaaacgtgttgccgttcaggctgttaaagaaacagttccggctaacgctgtgtttggaacagttgtttctgccgagccgttgcaaatagatgttggatatgaaaaacctataagcggaagtcttataatactaccgctatgttttgataaaaaaacatatacaactacaagcagcggtagtccgccgcatagacacacaatagaaattgataacagcctaaaggtaggagacaaagttgcactgcttaaaatgcagggcggtcaaagacatgttgtattgggggttgtgtaatgttaccaattatatctacgcctagagaaaaaattattgatactaaaatagttatatacccctctaaaacatatgaaatagattgggaaaacaaatgtatagctgggtcaattgacggcgtaaaagcgttacagcaatcaatacacttaattttactaactcaaaggtatcgttatccaatatatagttgggattatgctacagatattgaccctctatacggtatgagaaaagattttgttgtgcctgaactgcaatgtagaatacgtgaagcattattacaagatgataggataacggacattatagattttaaaattaaccatatagaaagaggcaaatatgatgttagttttgcggtgaagaacaaaatatcagatacgctctacataaatgaggtgatagaagcatgattactagcaactatgattttggagatataacaaatagaatgttgcaaagagtaccaagtaaaattgataaaagacaaggctcattgatttataacgctgtagccccggcaagtttggaatttgcaaaaatatatcttatgttacaagcaatagaaaaagaagcctttcccgatactgcaagcatagaatatttgaagagacatgccaaaatgaaaaatttatctcttaatgaagccacttatgccattgttaggggtgaatttaacaagaaaatacctgagggaacacgattcagcttacaagacagcgaattaaattatatagtaatgtctgaaagtcccaaatgggatggggacaatgcacggttatattattatttgatgatgtgtgaaacaaccgggagtaaaggcaatcaaaccggaaacttaatacccataaccgacatagaaggattaactgttgctaaaattgttggcattgctacttatggtacagacacagagactacggaaaaatttaggaacagatattttgatactattttaaacccaccttttggcggcaaccgtgctgactacaagagatatatcaggtctataaatggtgtaggagcttgccgattgataagaacgccatcaggcggcggtactgttggcgttattatctgcgacagcgaatataacgagccgtctcacgagttggttggcagtgtgcaaacgttaattgacccggttgttaacagcggcaacggttttggaatggcaccaataggacatagagttactgtatcagctgtagaaacggttggaatagaggttatttccaaaattgagtatcaagagggttatacctggaacgatataactgaaagttatcaaaatactatatcagattattttgctgaattaaacgaatcatggggagatatagaccctgataatatagtcgttagaatgacacaaatagaacaaagaattttgaatttgaatggggttttagacgttgttgatataaaattatatccttatggagagaacgcgactacaaataatttttcggtgcctgacggcaaacttgtctctaattgctctacaggttgggagccgttgtcgttaaatgcaggggtagaagccaaaatatcaaaagacccatcaggaaacggaaatgctgttaagtttttatgcggctcagacgtatatggaaacggttggtcttatgatatagctagacttcttgataaaaagccaacagatttcatagaggcaacgggatatttaactgtctcgtttgaactttttcagcctgaaaacagtaggggattaggtaatttctatattgatttgagcggtaataaaatcattaaaaacagcgacggtggaaacacatatacatacggacggttaagcggttatgaaccaaatacaactgaaataaaaattattggcggtagtgctaagacgagcgacggtgtggataaggtgcacatagcaaatgaaaaagttttgggaaattgggtaactgtagaatttaaaattgattttactacacgtcagaatttcacttgtatatataataatagagaacatattgttacgggattcccgtcaactgttgacccgtcttcattatatcttaatatacagctttctgacaatccacaacataccaatgatatagaaacgtatattaaaaatgtgtctgcggtatatataacggagtaggtgaaaatatggggaaaatatacacattaaaatatttgcctgaattctttcatgacataattgattttgccgaattatgcaaaacgtatgacgttgaatttttgcttctcgaaaaagaaattgaaaagttattaaataactttttctttaattttttaaatgagcaagggtgtaaacgctgggaagacatattaaaaatatctatgcgtgaaactgatacgttagaagacagaagatttagaataaagtctatatattttggagatacgccatacacggaaataacaatgctggaaagattagaaatgcttgtaggcaaaggaaatgttactgttagtatagatgtaaaaaattataaagttacggtcagattgtcattgagcagaaaaaaccaattagcagaaattataaaaatgattgaaaaaatggtgccgcttaatatgattatagatgtcaagctgttatataacacctatgagactttaggattatatacgcatgattatttaggtagatttacacattatgcgctgaaagaaaatgttttgggaggttagacatggctacaactacaaaaatatacggtttaaaaaaaccgtcattaacagatgtttataacattatggattttaataacaattttgataaaattgacactgttttaaatacaaaaacagaaatagaagatatagggacactgaacggcaccgaaagcgtatttaatacacgaataagtccaggtttttataaaggaatatggaataatcagtccatgaagcaaaagggagattttacgctttttgtttttgatgtctcctctactaatacggcagaagatacaaaggaaacagtagtaatgcaagttttatttcatgaaaatcaagtctcggtccgtttgggtgtgttaggtgttccggcgaattggggtaatttctctccgatagcaacaatgtctaatatatcaaacatagaacaaaagataggcaatttatcaaatcttactacaacggctaaaacaaatatcgttacagcgataaatgagttgataacgtcaatatcaaaaaaagcggataaagttacaaataacggatttgtagccggaggagcggaagccggaaaagtcggcagtatatcaattggaagcggtataagctccaccggagaatatggaatagcaattggagccggagcggaaggtacaaatgatagtgtatcaataggacatgggtcaattgcttccgggattgattccgttgcaataggagatgtagcggaaagtttggctcaaaatgctgtgcaaatatgcgaaggcagtaacagcgaaagtgaaagtctgcaatttagaaaatataaaatagttagatatgataccacagacgatgaatattatttgaaagatgttggcaggttgagccgattatatactactaatcggtcaaacatcgttgaagcaattaatgaattagacaatgaagcggaaaataacacaactgaattactatcaaaaataacggaacaaaataatagcttgataatgctgatacaaatgcttgctaatactgggattaacatagttccattactcgaaatgctgggtaacactattaccgttatttctgatactgtaactcaaatgtatcaatactctgacaataataatcctgataataaattaaaaggaattgtttatgcaccaaatcttgaaacagttgaatcacgttcgatagacgataattcaggcatgacaacaataatcatgccaaaagtcaagacaattaaaagtcaaggcttttgggctagttatggacttaaaacggtctttatacctaatgcttgtacatctcttgccactaacgcattttctatgtgtggaaatttaactaacatatatattgataatgtcgaaggtacatttggagatatagcagcagattcaagtttgcctaatttaaaagttacatatttaaaaaagtgaggtgtctaaaatggaatacagactaataaatggtatttgccatatatgcaaatataaaacggttgtaacaaatgagaatggtacaaaacttgaattttatcatttggacgaggttgaaactaatcagtcattggaactacatcagcaactcagcgacttgccagctgagattgttcctcttgatgtatcagactgtatttggcttgacggtaaagagttctcgtttgatacagaaattattcaggcttatgaaatgggggaaacagaatatataaaatatcttttggaaaaatcccgtcttaacaatgcaaatctgcttaatgaaattaaaacattgggtcaggctcagactgatttagagttagaattaatcgaacagggacaatacataacagacctcgaattacaacttttgggagggggtgaaagcaatgtatgaaaagattaaaaacagatacgaaaaaggatatgtaaccaatagtcagcttatgcgttatatatcactcggagtattgacggaaaagcaggcagaaaaaattaaggcgttggagaatgaataattatgataattgattataaagttgattcgcaaattttacgcagaaccagcagaaatttaatagtggcggacagcataaaatatttggctgtccgttttaatttttctgatgaatggaaaggcactaaaaagacagttgtttttttatatgatggatatagctataatgttcttttggatgaaaacgaaatagcgattgtgccgcatgaagttataaaaagtcctggatttaatttatctgcatatggcacgaataacggaatgcgaataacaactaacacatgcaaagtatctgttataaagagtggatattgtgagggagaaacaccacctgaaccaacacaaaacgtatatgagcaaatattagatagattagataatagcggtggaggaacagaaaaaaacggaaaatcagcttatgaaatagccgtagagaatggatttaacggaactgaaagtgaatggttagaaagcctaaaaggtcagccgggcaaagacggaataaacggagcagacggcaaagacggagcagatataacagctataaatgattccgaaacctcatcagagaccacgtggagcagtgcgaaaatcactactgctgatacggagctacagacacaaattaataatacatataatcatcacctgaacgatagtaacaatattggcaatgaggtatacgacggagcggttcttactatagttgatgatgacgggtccattgaattcttaaataattttgtgccgatatataaagataagggtgttaggtgcagttttgcagtcgtagcttgcagagcagaaacaccaacaggtacaacaacaagcggtgacccttacaaggctttaagctggacacaaataaaagaacttgtgcacgatggcttcgacatgcaaagtcacacatacagtcatgatgtgaaagtgtttcggacaggcgaaaacttaaacgaggaacaacttgaacatcaatttggtgacgctgatagattatttagacaaaacggacttgattataactgtatggtgtatccatggggtacggctcaacaaattaagaaaaaagttgcgaagcgatatgccaaatatggaatgacgttgattagcggggatacgggactaaatgatgaaataagcgaacctatggcaatatcaagattcacattgcaaagcggttcaacgagtttggcaagtgctaaatctcaaattgatacagccattgccaacaagcaatggcttattttatgcagtcatgcaaatgcaaatcaacctagtgccgacacgttgggaaatattattgattatgctattagcaaaaaaatacgcatagaaacgttttcgagagccgcaaggctcaaggctcctgtgtattatacaggcgagggagacaatatgtttcgggttatgcccaatggtgatactaaatgcaagcctgatgatgatactgtgagatatatcgtgcaaagggctacagtattaggattatttgaagacacggaagcgagcatatcggcaagttacggaaaaactcaaaacatagcaggtgacacattggataagtcgcttataacagttattgtgacaatgacgagtggtaaaacacattctgtaaccgattatgctgtagaagaaacggatttaacgttggcagagggcgaaaatacgtatcatataaaatataaaggacttagttgcacattaacggtaacagcgatagcggcggcggaagccgcagaaattacacaacagccgcaagatgtaacaacagaggtcggagaaactgcaaatatgtcaataatcgccaaaggtacaggtttaacttataaatggcagtggcttgacgtgagaggtgatgaccccgttggaatatggactaattgtgcagacggcacatcaagcatattgcaatttacagtagagccgtatcataatttacgtaaatacagatgtattgtaacaagtagtatgggggaaacgctaacgtcagatattgcaaccttgcatataggaagcaaatacaatatgttgatagagcacacctctgaatcagaagctatcgaacgaacatggtacagtatccctttatcggcaggtgcgtatcattttcgtgctactgtggaaaaagctgaatacgcttgtacattccagcttaagacagctatcaataatgtagatgataaaaatggtacggttatgtttatcgcgccaacaggcacgtttaacgccgcaagcgcaatatatacgtttgagggtgattttacgttagaatcagacacggaatacctatttttgtacacgaaaggaattactgccgggaaaacaataactattgaatattataaaactaattaggagggcagaacatggacgaaaacgaagcggcaatcagagagcggctgacggcggttgaatcctccgtcaagtctgctcatcataggatagacaacatagaggagttgacccaatcggtaaaaacgcttgcagtggaaacaaaatatctcaaagaagatatttccgatgttaaagaaaaaatagacgttatagccggacgaccgtcacagattctaacggttataataacagcactaataacggcgactataagcggtgtaatgggctttatattatcacatttattaaaataattaaggaggtgaaagagcatgaataataacataacagttggtactatagcaagaacaatagtattaattttagcactggcaaatcaggtgttagcgatgagcggtaagcaggtacttaatattgcagacgatgatatataccaggttgttagtatagtatttacaattagtgcgtctgtttggagttggtggaagaataatagcttttcatatgaagctataaaggtggacaaaataatgtcagagctaaaaggaaatgaaaactagaggttgacaaattgaataaataagtatataataatagcagataagagataaccgttaaacggttgtcaaagatttacgatattaatatagccgcaactttgaccgaggggcggctatatcgcttttatggaaacaatcacaaagaatattatgattgaaacaattacttttaataagtacttccacataagcgacacctcctttcagctgtgagaaacagcatatggagatgacaaccgtccttcaatttcctcttacctgcttgacagtattatacaagaatatacataaaaaatcaagttaaaatagcattacggaatgtcatctaggggcattctttttttgttataatataatagattggaggaataagaatggcaaagatatacatagacccgggacataactgcagcggagcggatacaggagccgtggggtatggattgaaagaacaagatgtatctgtgcagattggagtgatactaagagaattactattggttagcggacaaactgttaagatgagccgtgatagtattaccgatacagtatcaagcagcttaaacggcagtcttgcatacagatataacagtgccaacagctggaatgcagatgtatttgtatcaatacattgcaatgcggcaaacacaaaagcgtatggctgtgagacatattattgcacaggcagcacgcagggcagggcgttagcggaatgtgtacagccgaatatggccgcggagacggaaaggtataacagaggtgttaaatctgctaactttgcggttataaaacacacaaatatgccggactttacttttatatcctccagcctaaattctctgtactgttcattgatgtccttgtccatatatgccatagccgcaaaattgcagtccataacaagcctgtcaaactttgaatttccacatataactattggttttataataatcacctcacattacaattttatgtattcttttgctactgttatttttataatccctgctgcactccgcgtccgaaaagtcccaccgccgattatccggcttgattacgaccttacgcacatcgtcagctatgggttgttcttcagctgtgtcctctgcgcaattaaaaaatgccaaaagtatcatcataagcggagctgcgtaaaatatgggataccactcaagcgacctaaccataactaacaatacaacgccaaccaccgctcccgatattcgtataatccagttatacaattgatctcacctccttatatactcccagtatttcaaaactggcagaaccatacatttcattaaattgctgttttgccagctttgccgatacagattttacagttatatatttagttgcaggcgccccggtctttagcctatatttaatcaaaaaattatacatcctcaatcacctctttctatatcaggtcaaatttaatttttttaactaccatttaacatttaatagttagtttttttattcactcaagttttttgcaaacgtctcagccgaaatatattttttaccacccaaaaatgtgcgttttgcaaaatcataacaagtccctgtatagtcctgaacatccttaatacacaaaagatgacgtctatctccgtatttatcgccaagaaactgtaaaacgctttctaagttctccctatatgctgccttctccctcggcattttgctcactctccttcctttatttcacgtaagtatatttataactgtttatatgctcttgctcacgccatttataatacgccgatatatcaacataccatctgcaaccttgcttatatgccggaaaagcttttttatgtattcagcgttttactgtttgttcgtcaatcccaaaatattctttgaattgtctaagctgcatttgttgaattttgcattcttctatttttatttcacctccctttatttattttgattgatataaaatcccatttgtgctatactcatctcaaaggaggtgagtataatgcgagtatatgccaacttattaggcagctggaccgatataacagatacaggcactattgccaaccaacaagatccaactacctattttaaagaaaatctatgctatttagatggctctaaaaacgcaaaatgttttgaatacgactacattcatgttcaatacaacggcgttgattatagaattcatccggctatgatacaaattcttaatcaataaaacccttaaattctaaattaagtctactttgtacagcgttcgcattaggtagttccaacccacttgatgcttcgctgtatagttgttctatagcaatctttaatcttgaccactcatattgtttcaaccctgttaacaattctgcaagttgttcaattttctttatatccacttttctcacctccttatttgtagattaataatctacttagagttaaaaaaaattttatttctttctttctctgaaagtgataaaactttttttaacttctcaatttcactcgctttaaactctgatctattattgattttgttgtataaacacgcctctgatgtttcaagtatttttgatatatcacgttttgtaataccagcacgtgtaatagcaagttcaagttctaatgtatccgtcattaattaacccccttttttgtagattatttatcaacaaagttataataacacaatgtagattttttgtcaacaccttttttaatatttatataaaaaagttgacattcagtctacaatatgttattattaaaaagcgaaaggcggtaactaatatgaatttatatgatagaattaaagcaagaagattggagttaaggctttctcaagacgaacttgcacaaaaattaggatacaagtcccgttcaactattaataaaatagaaatgggaaaaaacgatattacccagagtaaaattaaagcttttgccgaggctcttgaaacaactccatcttatcttatgggctgggaagacgaagaaggcaacagcactcttgaaaaaaaatatgataacatagtccctattactacatacaaagtccctctgcttggcgaaattgcctgcggcaaacctattttcgcgaatcaagacctagaatgctatattgatgttacaactaatattaatgctgattttgctttgaaagcaaagggggatagtatgataaacgcaagaatatatgacggggacatagtttttattagaaagcaatgcgatgttgaagacggtgagattgccgctgtaattatagaagatgaggctacacttaaaagagtatataaagatactaatacaatcactttagtagccgaaaacgcaaaatataaacctattgtttaccgttccggcgattgtgtaaacgtacgcattctcggaaaagcgatagcttttcaaagcgatgtaatataacataaataagaattaataagacatatagaaattgtatacaaaagttatatataaaaagtcgcacccataaagggtgcgtggattgaaatacgtgcaaacatcttttttcggtgtgtgtaaacctggccgatttcgaccaggttatacatatacagcgataaatataaataaatctcagccaaaaataaaaggagaaaatatggaaaaaatatattatccaaatgaagaaactgtaaaaaatgcgatgcaaactgacgatccgctattactgttagttgctcatgacggcagacggttaatagtttcatccatagacgatgcaggagaacatcttatattattacgtttagcaggatatgaagatatggacttagacaaatattttagacttgtagtaaataaagatggagctgactggacctttgtatgtccaagtaattatgaaaatataaccaacaaatcaaaacgtatccaaagattttacaaagatggattttccatcataccattagcgttaaacgaaatcggttatatggttggtattgatataccaagacgttatcgccgccatattgatatgatgtaatggtatgtcctcctgggtgcgttaattatgctgcaggagaagttaaaataattggttgttgcaaaaagtgcaacaaccattcccacactttggataaaaaagcatcacaaatgtaagaagggtgaatacaatgaaaaaacgagccgatggaaggtactgtaaacagatacggattaacggaaaaattaaatccttttacggcaaatcagaaagagaaattaacagaaagattttagcctatcaagacaccaaagaaaaaggagaaatttttaaaactgttgccgaggaatggctcgacgaatatttattaaacacaccatataccacttttaaaaaatgcggaaaaagcgcatatttatctctattacaagagtttggaaatgaacggataaaaaacattacatcgcatgacgttgatatatttttaaagcggcttgccgcaaaagattacgcacagaagacagtggcaacatataaaagtgtttttaatcaaatatttaaatttgctatagttaatggatatgctaacataaacccggttacatctgtttcactaccaaagaatttaaaaaaatcaatacgtaaaatgcccgacaccaaagaaatagaaatcgttaacaccttacatgagggatttggatttttggcctactttctgttatataccggccttagaattagtgaagcgcttgctttgaattacgaagatattgacagagaaaataaaattataaatgtaaacaaaaaaattgtacatgacggaaataacccaatattaatatacgaaactaaaacagaatccggaacaagaacagttatacttttggacagagttgcaaaatatttgccgaataaaaaacatggcataattttctgtaacgagcatgaagactatttaaccaaaaaacagcttgcttgtcgctgggacaaaatgcgcaaagaaaataatttaacattaaccgctcatcaattacggcatgcttatgcgacaatgctttttgaggccggaatagaagcaaaagacgctcaagaattaatgggacacaaagacataaaattaactcaagatatctacacgcacattagacatttttcgaacggtaatatatataatagcgacttcagagcaggaaaacatgattttgctaatgttactgccaaccaatttggtgcgtcaattgcttctgtcttaaatatttatggatgtttgccggctattgctagtaaaatcaagggaaatactaaaagctataacttattcactgaaccggatgatgtatataacttgacacaaggaaatgctcatgaagtgaagcaatcaaacgcaatagctgaatattatcaggaaatgttaggacagtacacgaatgatagtaatataacgattaagaatgcggatttatcaaagtatgatgttcagcaagtcattgataaaaacctgcagtatagattccctgtagtagtgtataaagataatacagcaagtataatcacctcaaaaaatagtcagggaagttattgtataaatggaacgagttctgcaatatcaggaacatataatattatcgatacatattcgtatttgttatcaatagcaaataaaacaaatatagtaaactatgttgcggaaggcgaaaatctgtatgataatataaggtttacaaagccatatggttatgataagaatgatgttgaagtatatcaaaagttggattcaggttggagtaaaacaaatgttgttgaataacaggaatggtatgtaataccaacgccggagcctgatttagaaatagtaagaggagtgagaacagagtttgacggagtagtgccaaatatatataatgcaaatgaaaaatataaggtaaagaagtatggagatttgcaaggacaaacagaaacatggtactatccgtatttgtttaaggcaacaaatataggggcaataggaggagacgaccaaggaaacgtaaatgcaccgaatccggttacaagagcggaattatttaaaatattgctggaaagcgcagacgtggaattagaaaatgcaaatccaaatgctgaatattgggcgagaaactatatacggtatatgacgcaaaatatagatatatatgcagggaaagcaatcgatgacagttatttttacagtgaaatcccaagagatgagtcagcatatataataaagtcagtatttatgggagcagttgaagagacaaaagtaccaaacaagttatatacatatagtgaaaacatgtcatgcgaccaaatgagtaattggaacagcaataagggattgagtgataagtggaaaataaaccagtattatttagaggcggtaaggcagttatactgcaataaaataatggtgggagacggaaatagctttaatccaaaagatacaatcacaagagcagagatgtgtaaatcaataatgagctgcttatttacgctggatgaaggattgaaaaatgtaaaagttgtaaatgacggtgaaaagactgtatatattatgctttatgattctgagatagcaaaatacagcactgaaacgaaaggttttagtcgttatatgaataatttgggcgatgaataccaatatactgctgaatttttcaaaaattatttagaaatgatagggaacaaaaaggttgcgtttgttatatcaatacgtgatgttgattttgatgaaagcactattggatatgcaaatactgccggagatgaggatggagcagaaattataccttcatatgaaattacggatactagaatgaataatattataaataaaactacagaaaagtctataaacataataaataatataagtttaggattatctgcggcaaatgaacatagaacggataaaatacaaatgccggaaatatatttaggtactcctcatacaagtgcaaatgaagattgggttcaagtgtgggaacaagttaacgtaaatgcaaggcaaatttatttagataaatatagttgggtctctaagtctatttataataacgttttaaattcaataggggatggcattataacaggaatatactttggacgtgaaaatccagatgccatgtataaggatgacggaataactccaactatatcgtatcaaaatgcctcaaatataagtgattttatacacagtaaaaataaaaaactactatggataccattttcgactaccactaatgagtggtataatataggtatgtatgtcaatcatggaaagagctgtaataatggcagcagtgatttatttgatgtagttatgatgcaacctggcatttattattccaattatagcggaacatttgaaaatataaaaagttatgatgcatctatacatgacggagaatttggttatgataatcaaaaacgaaagataaaagacttgtatacaagttctgaaaaaaatcaagtatatatgtataacgaacctgtaggtgaagaaaacaaaataaccaatacaaatgtttcttttgaaatagagtatgatatttctttagttaccggacgtgtgcacggaagcaaagtaattcctaaagataaagctaaaagctttacaataacctataagtattataaagatttgataaatgattctaatacatcgtatgctatatatgcaggcggaccaaatgaacaaaattatagcagtttagtaccaggtagaaataataatttacattattttgtaaactttccaacatattttggaagtgaaaaagatggaaatccaaatgacatcggagatagaaaagaattttcatggtttcatgatgaaataataaaggaaatttcagatgcttattacgatgtagattatagcaatctaatatatgatataacaaaaggattattatatggcgaaaattactttagtgatagttgcaaaaaatatttgggttggaaataaaacaatgaaaggatgtaaacatgatgaagaataaattatttagaaaaacatttatctttataacaatattcgctatatgcttttcttgttatattgtgaaagcttctgacaatattataattgaatcgggtatatattttcaacttggaaaatataacaataaaccgattttatggcgctcagtagtatctgatgaccaaaacggaatattaatggttagcgacaaaattttatgttataaaatttttgatgtgtctattaatgacggaggaggtataaccaataaaggtttttgggagaataccgcaatgagggtgtggctaaattcaacagctgattccggtaaaatagaatggattggagaacatatcccctcatccgataggattaaaaaaaattatatcagtccatacaatgatgaaaaaggctttttgaacaaagataatttttctgaaagtgaaaaaagtataatgaatactgtaagtcactggcaatcgttatcaactaaaaatgctattgtttcagaaaatggattaaaaaagccgttttttccaaagattgttgagggagaaaattctcaatttgagcgtactgtatatagatataaaattgcggatatggatagggcatattatggagcaatgtatagagttaatgatacgataatgactcttgatgaaaaacaattgtttaatgttctaaaacaacttggaacaatttctagcgaaaatgctgacggcattactaattcagaaggtgatggaatatattggcttagaactcaatatacaggtaataaaactgtaacttatggtagtggatcaattacaacagctacaaaggatggaaattatggtctctcgtgggtagatgaaattgagttaggagtaagaccagcattttatttaaacgagaataatatgataattaaatccggaagcggaacggaagaagacccatatatattggacggaaaaggacaagaaaatacagcagttttctgtaatggaaagcaagtggaatttgaccagcagccaatagaggaagatgatagattgctggttccggtaagagcaatatttgaacaactgggtgcggaagtaacgtatgacgatggagatggagttataacagccaataacggtgaaagaacagtagtaatgcaaataaacaatcctgaaatgggtaatggaacggaagtgttcacactggatgtagcgccaaagctagtaggggatagaacagtagtacccctaagggcagtatcggaagcgtttgactgtaaagttgactggatagaagaattagacagagtagtaatagacccgccacagccagaagacactgacgaaggacactggcaaagcacatgggatataattattaacggaaaaggaaaaaaacaataagttgtgctaacagaaaggattaaacaaaatatgatttcctctgctgtaagttaaaattatggcagaggaaaaatatataatttggaattttgatatgttaattccacaataaatagaaagagtgggatagagatgaaaaaaattacttttttattaattgctataatcttatcattacaaaatatatctggttttgcttataataatataacagctactgtggaaaattctcagaatatagattcttttaatatgactattaataatggtgaaataggagttactactataaatcaacaaagctatgttgtatcaaaatgtagaagttttgcgtttgaaccaactatatatgatgaaataatagaaagccattttcccaaagaattgtatattgatattggagattatttttatacgcgtgagttaagttatgattatccatatattccggcaacatggaaatataatgttaatcctaaaataaaactttataataagaattttgaattagaaaaaattgcgaatttaggtgagacagcttttccgcgaaatatttggtatgaaaatgatatgtattattgttcatattatcaattttataagaaaagttcagatacatatgttcctgctaacgctagcgatatatactatggacagatagatactaaatatttaataacagttgcttctaaagatttcgaaaattggaatattatagatagtgaaaatataggtttatattctacaaaaccttacaataatagagtaattgaaaatgataaggtaaaactaaaaggaaatcaagtctcttttaaaaataataatatttttcagaatatattatatgaaaataatttatataataatataattactaaggttggaaatttgtttttaagtgtaaatagcgaaaatgatttattattatccattgataatatatactttatcaacatagttttaccggaagacgcatctaattttttaaagaatttaaataatggtttagctaatattttatatatttatgaatacaacgataatattaaaattcaacttggtacgtatgatgatttaaaatcaaaactggtaataacacaggaagatttaatacaaaatttaaatttaatttctaaatcaccttatataaaattaaataataacattttaggtttttcagagccgccagtaatagaaaatgatcgtacattagtaccgatgcggtttctgtttgagcagatgggagccgatgtaaactggaacgaagaaactcagacagcgacggcaacagttccaatagatactaatagacaaatgcgtacatttagcaacgaaaaagaaaaaagtgtaacattttctatagatgatacaacggcaacagtgaatggtgaaactgcaacaatggatgtaccggcaagacttgtaaatgacaaaacaatggttccgcttagattcttatctgaaaatttaggatataatgtagagtgggacgagactactaatactgcaataataacaactgaatagatatttattccgccgctcaaataaactgagcggcggagtaacatttaatttatataattaatataaattaaatgttacggtaaaataggaggatatagaaatgttaaaaaaaataaatttaagtacttatattattgtattattattattaattttaccaattaacgtgttagctaaaaacgaaataaatgctatctttgaaagtaaaagtacaggtacttatgaaaatatagaattgaaaactatttttgataataattatattgcaaatatagataaaaaaacgtacgtgattagtaaatgtaatagtccttattatataccaattgaatataatgaggaaatcgaaaatcatttttataatgaggaatatgtatttgcagatgattattatttcacacgtgaatgtgaaaatgatgcgagtataaattttatgtcacaaattaatttgcagaataatattaaactatatgataataattataatttaatcgttagcaaatcgtttgatggatatgtatataaaatatgttattatgataagaaattttattgcgaatacagacaagttttagaaaaccaaaccaattcatggggaggaaaaaaagttattatacatactatgatgtcagaagattttattgattggaaggatataggagaaaatcgtataccgaatacaaattcaaaagtatcatatataaataattctgtaaaaataaaaggaagtaataattttgtaaatgttatatatgaagatggatttgataaggttttagatacaatgtacggtgatatatttgttgcttcaaatataaaaaaggttgttacagatataggaacagaagcgacaagttatggcaataatttattgagttatgataacatatattttatagaaataaatacacctttagataatatgaaacaatattttataaatttttatgtttatgaaaatgatgattatattatttttgaaaaatataatagagatgagagattaaaaatattgaaacaggaagttgaaaataaattaaatttgataaaagatgcaccatatataaaattaaataatagcatcttaggcttttcacagccgccggtaatggaaaatgaccgtacattagtgccaatgcgttttctatttgaacagatgggagccaatgtaaactggaacgaagaaacccagacagcaacagcaacagttcctattaatactaatactcaaatgcgtacatttagcagcgaaaaagagaaaagtgtaacattttctatagatgatacaacggcaacagtgaatggtgaaactgcaacaatggatgtaccggcaagacttgtaaatgacaaaacaatggttccgcttagattcttatctgaaaacttaggatataatgtagagtgggacgaagctactaatactgcaataataacaactgaataaatttttattccgccgctcagtttatttgagcggcggagtatcttttgttgtatgccggtatatacagaagaggaaaagaagtttgaccagggttcaacaaagagatgggcaagttcagttgaaggataaagaataatgacgtagatgttttggtaatggatttggtgctgccgaccatagacggaataggagttcttgagagaatcaacagaatgcagctgaataaacgtcctcatgttctgatagtaagctcagtcttgaacgagactgtaacgtcatattccaattcatacggcgttgaatattgtatgttgaagcctgtcaactatgatgcgctgattgacagaatcacaatgatggcggctccgataaccacaggcgaagatgtaatgcagaactggaaggtgaacacaaaaaagtttgactatgcacaggtagaagcaatggtgacaaacgttatacatgagataggcataccggcgcatataaagggataccaatacataagaagggcaataatgatggcgatatatgatttggatataatgaactctgtaaccaaagaattatatccaaccatagcggagaacttcagcacaacgtcgagcagagttgaaagagcgataagacatgcgatagagctagcgtgggatagaggtgacatggacactctgaacaacgtgttcggttacacagtatcacaaataaaaggaaagccgacaaattcagaatttatagcaatgatagcagataagttaagacttcagcttaagaatgcttcttaagattttataattaatttttgtataatataggtatataataattaaaaaataaaatacaagaatttatatattcttgtattttatttcaaatcgtgatttaatttctttaaaagcaatagtttttagaattgtttataattaggtcttattcaatagaagttgctcctacttaagttatgataaaaagtataaatatttgagtgaatcaaattagaatctcatttgataaaaagaaattcaataatagttaaatttaattcaaaatgcaaaaaaagtaataaagtcaattaagtgattcttataatattattttttgcgactgcgcatatattgggatgagtataaatttatgactggcatataaatattgattatgtctaagaattaataaaataaattatttatattattaatactccaaagcctgtcacagacattctaagattactatcatattaattttataaatacatgttttggatatagtacattgtaagttgataaaataagttaatatatacgtcttatgctatgattaaattatgaaataaaacattaaatatttccttatcaatacttatcatagcatttttataaaaacttataaaaatatttgttataagtttaaatatttatttcggtttgcatttgccacagggttgatagcctgattttatggcttcatctatagtcatatatattatatttggcttatcttttatataactgcagttaaggtcatgatattttgttccgcttttggtcactccgactttttcttgattgacactaattgacggtgaaggggatgtttcagatatactcaatgtaggtgtgggagaagattcataatcatcagcttcatttgcttggatacttataggggatggataaaactgagataaaaatataaataaaacggtaacaataattattgttaaaacacttgttgatataattaattttatatttttatatttcccgggcgatttaattgccttaaattttttgcagagttcaatttcagcattactatatttattatgattatcaatctttgttaatatttcataacaatgttttttatcaagtaaagaaaacatagaaatatcttcaactgttgatatacgatttacagataaaacgcatattggggcaaggaattcaagagcgaattcgtttgcttcgcgttcttggttatcatcaagaagtccattttcctgaaaacctaatattccatgcttagaaaaatgccccattatatcgtgaccgagttcgtgagctaatgcgaaacgttttcctgcatttgataaattgttgcgataaaaaagtatcatattattatccgttttaatgctgaatgcaggtgaatatttggctatatcaagtacacccattcttttaaaaatatctatataatcagaagaattaatatcataactttttattatccagcctctgtcaagcagtatggactcaatgtcgtcaacgagtatgggaaattctttaatattatattgtaataaagtttgaattgcataatattgtgctgtcatcattatcctcccattttgtataatgataacgacaaaaagtatttaaataaaattaaatttattataaattaatctatattgtcaatgttttcatcaatcttattagattttaaatttttgaccgactgtcctttagcagcaatttctccgtattcagtatcaatttttaatatttcatttatgcctttgtctagttcatctttttgtttatttaatgcgtattcttcaattataggtttaatttgttcgataaatttagttttaagtttttcatcagagattaaatttactagttccaaaagttctttttcattttttgttaatttattatttaattctgaattgtcttctatagattcatcgctgggaattttattgtcaatacccagtatatcgtcggcagaaactttaaaatattctgctattactgttattttttcccatgcgggatattttattttattttctaaatcataaatatagtttctattaattccacagtcttttaaaacttttttgattgatttattgttttttaatgctagttctttaattttttttgcaaattcggatccagttatcatttccataatatcagcttcttccaattcacacttgtttatagtaagactttataaataaaatccgacaaagttagaaaaagtttaaccttctttgtcataaattaacaaattacagataaaatctgcatttttgttgactacagaaatattctgtattataatattaataacttatttataaagttagacaaataaaagaaaacttgcgcatatacaatggcaaatttattcgacaaaattattataatatatttttcatgagtatgcaatagttttttattaaagtgaggtgattatggtggtaaatgaaatcaaaattagattactaagactggaaaaaagacaagtggatttattggatgctatcagaaagaggggattcaagaacttacagccatcaacacttagtcaatatatcagcggaactattacaggcccgcaagccgaaacggtaataaaaattatatatgaaatattagaaagctgggaagaagaaaagtctacttatgttagataactgttttctaattataaaataataaaaatcgagtggaagataaataactccactcgatttaacaaagtttgtaatataacaaacaaaattagctaaacttattcgccgtcagattctcttgaattgtttgaaccactatttcttcttcctgaattattttcggtgttcttagactttgaaactcctgatgacacactgacgctatagtctatatctatacttctatttttcttttttattgtcgaatgtactttgtccataacatttttccatacaggaatacaagggtttgatgacatttctattgaagccggcgtatcatatccataccatactgaagctacataatatggagaatagccgataaaccatctgtcaaagttttctgatgttgtacctgtttttccggcagtaaaggttccgtctgacaatgccgctccgcgtccggtgccgctggtcacaacactgttaagatatctgttcattattgcggcggtctccggctttattgcttcccaggtagtatcgctgtctctgccggtcaagattgtttcaccgctttcatttttaatttcagtaaatgtgtaaggtttattatatacaccttgatttgggaaaatgcagtatgcagcagtcatttcaatatttgtagcgccgtgagttaaaccgccgagcgccaattgtgcatatccaagatctgtgtaaatttcaccgtttatttcttctgcttcaacaagagtagtaaatccaagtttctgcgtcataaaatcgaacgaagtctgaatgcccatgtccgacattatttctacaggcactgtattcaaagactgctgaagagcatagtcaagtccaacttctgaattactgtaagtgtaactatagtttcttggtacccagccatcataggattttcttttatccattactcttgtacttgtgtttattgttccattatccagtgcgggtgcgtatacagctaatggctttattgttgagcccggctgcctgggactttgtgctgcacggttcagagtaaaactggcttctttttcaccaattccgcctgccattgctacaactctgccgtctgatgggtcaataataacaattgaagactgggctgaggaatctgggaaattatttgtattataatagtattcttcaactattgattgaatttccgggtcataagcacagtaaattttaagaccgccggaatataccatttttgttgcaagactttcagaatagcctttttcctgcaatcttgatattgcatcacgtactacttggtcaacataatatgatgttattatttcctcttttttagtagcagccgtatctttactgaatgtaagaggatagttaactgcttcatcatattcttcctgagttatataaccaagtgaaagcatctttgctaaaaccaattcttgtttttctttatttttatccggatttatgaatgggtcatataatgccggattttgagtaatagatgcaatagaagcgcattctgccagatttaattgacttacatccttatcaaaatacaaatttgcagctgtttgaactccatgacagttttgggataaaaatatacaatttaaataaagttctaaaatctgatctttagataattttttttctaagtcaatagcttttgaaatttctgaaatttttctggaaattgtttgttcgtcatcaccggttatattttttataagctgctgcgtaatagtactgccgccaagagaagcttggccgcctttaccggttagtttatctaaaaaatatgttaaagtagctttaagtgttctttttatatctactccattgtgaataggaaaacgttcgtcctcaatagcaataaaggcattttgaagatttttaggagttgcgtccagatctacccaaatcctgttttcatcagaagataatgttaagagattcttttcttctcctgtattgtgatcaagatatactatgtttgaattgctgtccattgtcagtgaatccaaatcaatgccgtcagtatttccccacatgcccattacagcagtgagcacagctcctccggcaacagctcctccaataataattgtaattaaaaatattaaaataaattttccaacgtattttcccattattttttccccttataaaatatcaatcatcaaaatactacatattatactatataattatatcacataaacaggtataataaactataaatctgttaataatctattaaattagtgttacagcaaatatgataacacaagatatgggggtactaattatgtataaaaagttagtcaaaagtattatcatttgtgtttcagttgtgttctttactttgatgattggttatataacatattttgcaactgtaaacgttataaacaggtctgtcactaaaaatttaaattctgctgaagcagttgcatcgcaaacaacaccgggaatgcaggaagcaattccaagcagtacacccggaaatgagcagtattatctcgcacgccttaatggaaacagcattgaaatatatttgtgcagtaatacagattcagcaaaagcagctgaaaaatttttatactcatttaaggtatatgcgtcagatatccctgacgatgatattttaaatttaacgcgcggaataatttttaaaactaaagaagaattagcgtcttttgaagaagattacaatagttaaactttaaaaggttactaatgtttcattattatgtttgttcagacgtttctaaatacttctctaaagtataatataattcatctgcatcaacaggtttaatcacatgtgaattaaaaccattatttaagattttttccacatcatcctcatatacgtcttgcgacatagctattatggggatagtagaggagttagcgtgcttgctttttctgatagtatttgccgcttcatacccgtccattataggcatatctacatccataagtattacatcaatatccttatattgagctttattaaaagtatatactgcttcacggccatttttagctatcatagttttaaaattaacagttttaagaacatcgtcgagtatagcaagattaagttcgttatcttctgctataagtattgttttaccggaaaaattatattcttcaggtgatttatatacacgaacttgtttgccgtccttttcacaaatttcaagaggtatcgtaacagtgattgacgttccttcaccttcagtgcttatagcagaaatatttccgttcatcatagaaatatacttttttgtcattgataaaccaagaccgctgccattttgtgcagaatcattgttgtaattattgctaaatactttatccagtttatccttgctcataccaataccggtatcacttacaacaaattcaaggatagcataatttttgtcgccggatggtttttgtgttgattttaagtcaatagtatttccattttctgtgtatttaagcgcattagtaagcaaatttgatagtagtagacctagcttatatgaatcaccataataattattttcagtaatatcatacctgttttcagaaaaagtaatatttctctcattacaaagataagaaaaagtctgtcttagatcatttagaacgcggcttagtttaaatggctcatgatttatttctaaagtctgtatatctagattagaaatattaagcaattcatttacagagttaaagagagtgtgtgctgtatcatcaattgcattaatattttgtttagttttttcagaatcattaagttctttttttgttctgttaattaaagaaataagagtactcataggttgttttatttcatttgacacacaattcaaatattcagattttgcaattccgtttctttcagaaatttttaacgcttctttcagtgtagaagtagatatttccaattttctgtttttcattctcgattcaaaccatttaattacaaattgtatcaaaagaagaagtatcattattaggatagagccaatagcaagaagcttaccatatttctctctaaatgatttctcataattaacatatatagaatttgaaggcaaagacgaactgcttatatgatattttttcattactttaaaatcaaatttatattttgaacttgaattttccgataaaggtatttcggatatattttgtctattaattattgaatttacagtatttgctgcaattatacctgactgctttgaagacaacactgctccacccaaataaccgttaccaatatttaaatcagttaaacaaaaggttggaattgttgtattttctgttattagcttgcacacttcataatcggagtattgctttttatcaatagtttcattcatatttaaatagaacagtatactgtcattattaagtttagaaagagcggatacaaattcttcttcatttaattcagaagaattaatatctttgaaaatgatattagaaaattgttcctgctcagcataaaactgatctctgtcaccgatacctgttaatgtattatcagaaatagcaataatattttttgcgtcaggataaagatttagtgctgtatgaatattgttttcaatatttaatttttctatagaaccagtaattaacggatccattgctgctttttcagcaataaatttgttttcaattccttcaaagattatgggtgtattaggaaatagaacatttttgtattttaaaactaagtcaagcgcttcatcgtctccaacgataactatatcgaaattgtttttatatgaagaaatatgatagttaagaatatcataaaataatgcgtcgtttttattatcatttattatatttgaattcaaaaattcactttcaagtgtaactgagccgtcaagtgtttcgcgtataccttcgagttgtttaagaaccgatgtgtttgagggcgagtatgaacttataaataaaacttgtatgtttttatctgaactaacattgttattttcctcgctaaaaccattagtataactagtagagaaaataataaaaattatggtaaaaaacataaagtattttaacttttgcatgtgttttgttttgaaaataaacattgtagttgcccctttaatttacatatatggtatcattatgatagcataaaaaggtgtgtcgcgcaaggtttatttttttcgctaaaaagcattataatggtgagttctcttttgagcatattttttaaaaaatgtgttgaattataggtttcaaatgtggtacaatgtgagataagtgttattaataaatacattattatctgaaggaattattttatagcacggaggtgtgttatggattttaaagttgtatcaaaatattcgccggccggcgatcagcctaaagctattaaaacattagctgacggtattttaaatggtgataaatttcaaacgcttttaggagttaccggaagcggtaaaacttttacaatggcaaatgtgattgaaaaggtgcaaaaacctacgttagttttagctcataataaaacattggcggcgcagctttgcagcgaattcaaagaaatattccctgaaaatgcggttgaatatttcgtatcatattatgattactatcagcctgaggcgtatattccttactctgatacctatattgagaaggacgctcagacgaatgatgaaattgataagcttcgtcacagcgctactgcggcattatttgaaagaaaagatgttattattgtagccagtgtttcatgtatctatggattgggtgacccaatagactataataatatggttatatcactgagaccgggaatgataaaagacagggacgaagttattgcaaaacttatagaaattaaatatgaaagaaacgatattgatttttcaagaaataagtttcgcgtaagaggagatgttttagatatatttccttctgacgcatataatacggcagtaagagtagagtttttcggagatgaagttgaacgtattacagaaataaacactgtaacaggtgaagttattggtgaaagaaagcatattgcggtatatcctgcatcacattatgttactacgcctgagaagcgtgacaatgctataataagtattgaaaaagaattagaagaacgcttaaaagaactcagaaataataataagttggttgaagctcaacgactagaacagcgcactaaatatgatatggaaatgctgagagaaaccggattttgtaatggaatagaaaattactccagacatatcagcggcagagaaccggggagtcctccgtttacacttattgattatttaccgaaagattttttattgtttgttgacgaaagccatgttacgctgccgcaggttagagcaatgtatgcaggtgaccgtgccagaaaagaaaatttggtcaaatacggatttagattaccatctgcttttgataacagacctctcaattttgatgagttttggggaaagctgaatcaagcagtttttgtatctgcaacaccggcagattttgaaaaagagcaatcgactcgtattgtagaacaggtaatcagacctaccggtttgcttgatcctgaggttgaagtcagaccgatagatgggcaagtagatgacctttacacagaaattgtcgaaaggacaaaaaataatgaaagggtcttagttactactcttacaaagaaaatggcggaaagacttactgaatattttgacgaccttggtgtaaaggtaagatatttacactcagatgttaagactattgaacgtatggaaattatcagagatttaagacttggcgagtttgatgtattagtcggaataaatcttttgcgtgaagggttagatatacctgaagtttctcttgttgctatactggacgctgataaggaaggttttttaagaagcgagacatcgttggttcaaacaataggtagagcagcaagaaacgcaaaaggaaaagttataatgtatgcatacacaattactggttcaatgagatatgctatagatgaaactaatagaaggcgcggtatacagattgcctttaataaagagcataatataattccacagacaataaaaaaagaagtatatgaagttattgaagctaccactgaattaagcaggtcagaaaaaggaaagacagcaaagaagaatgaacaaaaattaattgataaggaacgagcaattgcagaattaactgttgatatgaaaaaagctgcagagcttcttcagtttgaattagcggctcagatacgtgatgaaattagaagaatgcaggaagaataagcgttataataggagttgacataaatatgaacaaaaatataattgtaaaaggtgcaaaggaaaataatttaaaagatattgatttggaaataccaagagataaacttgtagtttttaccggtttaagcggctccggaaagtcttcacttgcttttgacactatctatgctgaaggtcagcggagatatgttgaatctttatcagcttatgccagacaatttttaggtcaaatgagcaagccagatgttgaatcaatagatggtttgtctccggctatatcaattgaccaaaagacaacggcgagaaatccgcgttcaacagtaggaacagtgacagagatatatgattatatcagattgttatatgcgagaataggtgtgccacactgtcctaattgcggaaaagagatttcgccccagtccattgaccaaattgttgactctgttcgtaatctgcctgagcgtactaaaatacaaataatggctcctgttgccagaggacgaaaaggcgaatatgtaaagacgtttgaagacgcaaggaaaaatggatttgtaagggcaagaatagacggaaaaactgttgaaatttctgatatggatattcgtcttgataaacagaaaaaacataatatagacatagttgttgataggcttattataaaagagggtattgataaaaggttggctgattcattggaaacagctttaaacatggcacatgggcttgtgattgttgatataatagatggagaagagttaatgttttcacaaaattatgcttgtgaggactgcggtataagcatagaagaactcacacctagaatgttttcttttaacactccttatggtgcgtgtccggaatgcgcaggtttaggacatattattgaaatcgacccaaaccttattatacctgataaagaattatctataaaccaaggtgcaatagccgcaagcggttggaacggaactgacaaaaattcgatttcgtatatgtattacagaggtttatctgaactttatgaatttagtcttgatgagccgattaaaaatctccccaaaaaaatacttgatgttatcttatacggaaccggtgaccaaaaaataaagctgacctatgacaggaaattttcaaaaggagttcagtatgcaagatttgaaggaataattaataatcttgaaagaagacataaagagacaaattctgactggatgaaagctgaaatagaaacctttatggtggatatgccctgtccaaaatgtgaaggagccagattaaagccggaatctttggcggtcactattggaggtttaaatataaatcaagtaagtgatatgtctataactgaagcttacgattttttctctaatataaaaatcagtttatcaaaaaaagacataataatttccgaaaatatatttaaagaaataaaagagcgattgaaatttttaaaaaatgttggattggaatatctgacgctttctagaagtgcgggaacgttaagcggaggtgaagcacagagaatacgtttggcaactcaaataggttcaagcttaatgggtgtcgtgtatattctggacgagcccagtatcggacttcatcagagagataatgataaactgattgagactttgaaacggttaagagatttaggaaatactttgatagtggttgaacatgatgaagatacaatgcttgctgcggattatatagtggatataggacccggcgcaggaatacatggcggagaagtcgtggcaacaggaaccgccaaggatattatgaaatgtgaaacttctttaacaggtcaatatttgtcaggcaaaaaattgatacctgttccggaaacacgaagaaaaggaaatggatttaacttagaaattaaaggctgtcaagagaataatttaaagaatgtcaacatcaaaatacctcttggaacttttacttgtataaccggcgtatcaggaagcggaaagagctcatttgtaaacgagatattatacaaacacttatcaaatgtattaaatggttcaaaaaagaaacccggcaagtttaagagtataaagggtgaagaaaatttagataaggttattgatattgatcagtctcctatcggccgtactccaagaagtaatcctgcaacatatacaggtctgttttcagatataagagagttgtttgcggcaacccaggaggcaaaatcccgaggctacaagtcaggaagatttagttttaatataaagggcggaagatgcgaggcctgtaccggagacggaataattaaaattgaaatgcacttcttacctgacgtatatgtgccttgtgaagtttgtgatggaaaacggtataatagagaaacacttgaagttaaatataagggtaagaatatttatgaagtactggagatgacagttgaggaagggtgcagcttttttgaaaatgttcctaaaataagcagaaagcttcaaactttatatgatgttggactgggttatataaaaataggtcagccatccacaactctgtccggaggtgaggctcaaagagttaaacttgccactgagctcagcagaagaagcacaggcaaaacaatatatatattggatgaaccgacaacaggactgcacactgcggatgttcatatgcttataaatgttttgcaaaagcttgtagatgcaggaaatacggttgtggttattgaacataatttggatgttattaaaactgctgattatattattgatttaggtccggaaggcggagacggcggcggaactattgtcgctaaaggtactccggaaaaagtggcaaaaaacagcgcatcatatacaggtcaatatttaaaaaaatatttagagaaaaagaacgaaaaagctaaaatataagtgtaggtttgtcaatgatgtgttacaaaaaagattaaaagagttcaccgaaattgataaaagagttgatgtagtcaatgggagctttccaattataaagaataatgacgtagatgttttggtaatggatttggtgctgccgaccatagacggaataggagttcttgagagaatcaacagaatgcagctgaataaacgtcctcatgttctgatagtaagctcagtcttgaacgagactgtaacgtcatattccaattcatacggcgttgaatattgtatgttgaagcctgtcaactatgatgcgctgattgacagaatcacaatgatggcggctccgataaccacaggcgaagatgtaatgcagaactggaaggtgaacacaaaaaagtttgactatgcacaggtagaagcaatggtgacaaacgttatacatgagataggcataccggcgcatataaagggataccaatacataagaagggcaataatgatggcgatatatgatttggatataatgaactctgtaaccaaagaattatatccaaccatagcggagaacttcagcacaacgtcgagcagagttgaaagagcgataagacatgcgatagagctggcgtgggacagaggtgacatggacaccttaaacaacgtgttcggttacacggtgtcacaaataaaaggaaagccgacaaattcagaatttatagcaatgatagcagacaaattaagacttcagcttaagaatgcttcttaagattttataattaattttttaattttactaagaataataggtacaaaaaatgaccgaaaaataaaacacaaaaattttgtattttatttcaggtcattttttattgccatttttattatgtagtattacaaatttgatttaatcgtcttccccaaagggcaagacgatctcgcccgggctcggcgggcgaaacagggcctggcgcagcaaagtaagcaattataaattaattaagcggattagagataaaattaaatatacccgcgactgcgcgcctaacgaggaggactttgtcctcatttgagtatacatattaatatttgcgtattcatattattctttgagtattcatgttattgacattgtaggctataataaaacaagtcactttgtatcatacccacctagaaggtggggtcgcagacattgtaggtaaatcaaaataagttattttgtatcacacccaccatactggtggggtcgcagacattgtaggtacaacaaaataagttaatacgtataacacacaccctccaggtgtgaaatatcacaactaagttatttattgacattttaggtttaatggtaaatagatattgtggcgcatacgcaccttccaggtgcggtcacagtcacacctaccgatgcttgctaagcagcttctagttttgtgctttaagctaaaacttttttgccatacgtcagattttaatatatttatacaatttccccttttctcagctttgtataaaatacttttatataagtcggcaaattattatactcattattaatgtttgtaagctgctgatatgtaatattatggcttttaagcaaattttcaaaatccgctttatcctgttttactttcttttctatttttttgtttaacgcagcattatatcctttaagctctgacatcaaatcatatacagttttatcctcatcaatctttatacagaaattttctgtatcttcaaaagttttaaactgatataacagtatcgaatgcagttttgtatgtctgtatctgtcccgtatgtatatactgaatggattctctgatacatcgtagccataccagctatggtcttttacaatgcagatagaatactccttccgttttataaagtcgttttttgccaagtagtcgtgggcaatcatgtttacataatccattttttctctccttatatatttgtttccggtctccgcagctaagatatagttttggagccggtttttaatttttttgcgtggttattgagatattggttccatcgctttccataataatatcgccgtttaaatctgttcgaaaaacttctgagccctcgtctgacagacggctcagaacagcttctgacgggtgaccgtaactgtttttctttcccactgatataaccgaatattttggcattacctcacgcaggaatacatacgacgttgaagtttcagaaccgtggtgacccactttcagaacatcggctctgagattacagccctgttctataatattttgctcctcttcgcgctcagcgtccccggtgaatagaaatgatgtgttgccgaaagtgattttacagataatagaagtattattcatattgcttgagcctaagccggcagggacaaagaattctactgtgcagccgccgaatgaaattgtatccccggattggggatgaattatttccaatccctgttcggcggccttagttttaaagttattatatgctttgctggtgctttcttttttgggggcaaagacgtttttgacttccatagtggagagaggggcggatagaccgccgacgtggtcctcatgggcgtgggagcaaatcatataatctattgaagttacgtttagctttttaagataagagaataacagactgctgtcggcggcgttaccgccgtcaataagcatagactctcctccgcagaggagaagtgcgcagtccgcctgaccgacatcgataaaatgcacggataatttatccgatgaatcaacagacaaattatctgcataaaaagaagctgcaggcgttggctcagataattcaggccggataaattctgagttttggcaacagctggttattaagaatatagataataaaatactaattaataaagaatattttttcatagatatatccgcaaaagtaagtgaaaaataaaagtatttataaaatataaatatatggaatattaggatacagaactatgtaatatttcttatagacatatttactaacgattttatagtaaatggagttgtctcgcttagttttgcgagaccttttacattactgactgctatattaaaattatgtgatggatttttcatattagaggaagtataaatttttaaatcatttgttctaattaattctgatatgcaaaaatttaaaatatcagaaacagaagcatcgtaagttaaagaagcttcttctaaaaagttatataaatcatcctcaatttcataagttttgcgtattcttttttctcttttagagaatttattatttaaaaatttattattcatcttttgctacacccctcatatgacccaatattacaatattttcaaaattaatttaactaccgtcaatacaataatatataagaaatatttctacatatcagaatgtatattatgaataatttactagataaattttacacagtagttatgtaaattttgtttactaatgttgttatataatgtcaatctcataatattatttgaaaatattaagcaacattaatatataataaaattaagtaatatgttgaccacaatattggtcaaaataaaaaagttatatagcaagcatcggtagggcagacgtagtctgccacgtaaggcgcgcagtcgtggaaataaataatataataaatatcatttcagcaaaatacatttaattaatcttataattacttactttgttgcgccagacccagtttcgcccgccgagcccgggcgagatcgtcgtcccctacggggaagccgattgttgagctacaacattataaatgtgacattggcaggacaacatatgaaaaatatgaaagcggagagttaaatattcgcattagtgtgttagtagcattgcgagagatatatgattgcaaatatgatgatttttttgaaggattagtagcagaaagaatagatagttagttttttatatatttcataacaaaaaaacggattatatagcaagcatcggtagggcagacgtagtctgccacgtaaggcgcgcagtcgcggaaatatgtaatataataaatatcatttcagcaaaaaattatttaattatttttataattacttactttgttgcgccaggcccagtttcgcccgccgagcctgggcgagatcgtcgtcccctccggggaagccgattaaaataaaaacataatagattaaaaaatgaccttgacatttagaaaaaaaatgatataataaaagcagataaaaggtaaccgttaaacggtcagccaaaaattgtgattttaaagtaaccgcaatccttgggggagggcggttacttttttattgattcaatgagagtaatgaaaacaatcataaaaataattatgtaaacatactccatataaatcaccccctttctatcactaagtaagtgatagagggaggctaaccgtcctacaatttccttttacctgctggatataattatatatgtaatattgaataaagtcaaattaaaagtattttacataaaagcattaatagactaaaaaatgaccttgacaattagaaaaaaaatgatataataaaagcaatttaaaggaagctctcttcgacaggctcagaggtagctctgaacccgcaagcaagcttgctgattaaagataaaaggtaaccgttaaacggttagccgagtttagttattttaataaccgtgacccaggcaaaggcgcggttatttttttatagattcaatcatacatgtaaaaacaatcataaaaatgattatgtacatataatccatgtgaatcacctctattgtcattaagtaaatgacaatagaggttaaccgtccttcaattttcttttatcttcaatcagcaagcttgcttgcgggttcaaagctgcctctgagcctgtcgaagagagcttcctttaaattgctaaatataatattatatttgatttatcgaataaagtcaaattataagttttttacataaaacatataatatataaaaatgaccttgacaatttaaaaaaaaatggtataataaaagcagataaaaggtaaccgttaaacggttagccaggaatatagttaaaaagtaactgctatcctagctaagagggcggttacttttttattgattcaatgagagtaatgaaaacaatcataaaaataattatgtaaacatactccatacaaatcaccccctttctatcactaagtaagtgatatagggaggctaaccgtcctacaatttccttttacctgcttctataatattatatttgatttatcgaataaagtcaaattaaaagttttttacataaagacatataatagataaaaatgaccttgacaactttaaaaaaaatgatataataaaagtaggtaagaggtaaccgctaaacggttagccgagaattgggattttaaagtaaccgcaatccttggggtaagggcggttacttttttattgactcaatgagagtaatgaaaacaatcataaaaataattatgtacatataatccatgtgaatcatctcctttctgtcattaaataaatggcaacaaaggctaaccattatctttattcagcaagcttgcttgcagtttaaagctgtctctgaattatatttaaatgaaattttaaaaatatatttaattatttaaacttcacacctcgctgctgtgcagcattcggttcctatgttttgcccgaactttgggcggctttccatttcggaaagccgcttttttatatgaaaattaatgttttttaaattaatcaattcttttacactttcgtcataattttttcatatcttccgtatataatgttaaacatagcaaggagatagaaaacttgtttattttcaaacagttaaattttttatatattatataggaggtatcagtatggacgagttcaaaaaagagtttgatatgacttcaggcgacggagcagaaaattctgtgaccgaaaataataatgataattcaaagagtgagcaaacggcggcgtttgaaatgaacgaagtctcaactactcaggaaaatataccaagtcaggcggaagctaaaatagaaatcagcgataagacagaaaatacagcttcttcaactgaaacagcatcgtatagttacagcggttcggctttgggcggcaatgcacgtgaatcttttaatcaaaacagtcagtattcgggaacaaattatcggaaccaaaacagtcagagccaatcggcaaacacctcatataacacccagggttcaacttcttatcaaagcggaccttacagcaatcaggcttataataacggatttaatgccgcatacaagtcaaacgggaacggaaaccccggagttccgtataatgaacatataaacaagaaaaaaaccgataagaaatcagtcagatatgttgcggcacttgtggcggcggcggttctcaatttagcagttttgggcggcgcgtttgctctcggtcactcgtttggttcaaagagcggaacggtgacaaacaaaaccactttatcagaacagcttaaaaccgacgacggacagtctagcggaggaagcacaggcggagcgacaagcaccgcttcaaccacaggaagcaaggacacaacagagatagcaaaggaagtcggcccggctgttgtcggaataaagagcacggttcaggggcagatgagtttgttcggcggatacagcacatcagaagcacaggggtcaggcataattatcagcgccgatggatatattgtaacaaacaaccatgttgttgctgattcaagttctgtatctgttcagctcaacaccggttctgaatatgcggcaaaggttatcggcgcggatgaccaaaccgaccttgcagttataaaaatagagccgacagaagaacttacagtagcgaacctcggcgactctacaaaagtagaggtaggagagacggctatcgcaataggtaacccaatgggtcttgagttctttggaagcgtaacacagggaatagtcagcgcggttaacagaactgttcaggttgacaacagaacaatgaatcttatacagaccgacgctgctattaattcaggaaattcaggcggagcgcttgttaattccaaaggcgaggttataggcatcaacgcggttaaagtaacaactaccggtgtagagggtatgggatttgctatcccgatttcagaggcaaagcctattatatccgaccttcttgactatggttatgttaagggaagaccggttataggattgtcaacacgtgacgtatcggcgtatatggctcagcagtatggatggcctcagggcgcgcagattatgtctgtaacaacggataatgcaagaaacgcaggattacagcagggtgatattatcaccaagatagatgataagaccatatctaaaggctcagaccttactgagtataaagatacaaagtcacccggagatacggttaagctggaagtttataagtatgctacgggcaagactgagtctgtttcagttgttttgagcgaacagattcctgactaatatactgttatcaaattcggttaacggagaaatcgtaatccgattatatatacggcaggatggtgcggcggaagcggcgccgtttctgccgtatacttgtctgttaagtgaattatgtagtattgtatataaaagatagattgtcaaatagattattggacataattgtgtaggtttgtcaatgatgtgttacaaaaaagattaaaagagttcaccgaaattgataaaagagttgatgtagtcaatgggagctttccaattaaataattctaccagagtggaaaagaacatgctgggtcaggaagtaaagacaatagatccaaagaaaaatgagagttcggcaaagtatgacgactttggaagacagacagaagtaaagagcagaatagacggaggagacagcataaaaagctacagttatgacaataacggaaacgtaataaaagaaagcataacaagcaataagccgggagaagcgttgacgtacagaaatgtgtattatgaatacgacaatatgaacagactggtaaaaacatacacagacgagccgggagagacattgtatgagtatgacggaaacggaaacataacaaagatgataacagggtcagtgaacggagaaggaggagtaagcacaacatatgagtatgatagccaaaacagactgatttcgagcacagacccaatgggatacagtgaaagttatacatacgataataacggaaatattgtaagcaaaacagacaaaaacggaacagtgacaacaaatgtgtataacggaataaacaaccctctgtcagcaacaagcgaaagagacggagaaacggagacaacaacctacacatacgcagacacaagcacagcgctgctgagcatagcaaacgaagcggccacaataacctacagctatgatagaaaaggacaagtgacgggagaaagccgcacaacaggagaaacgctgagctattcatacgataaagacggaaaccaaacaggactgatactgaactcaaccaacggagtaagtcaaaacataagctatagctatgactatctgggaaagatgaaagaggtaagggataacctggaaaacgagctggtggcagtgtatagttatgatgaaaacgggaacctgacagaaaagaaaaccaacggaaacacaatggtaacgagctacgagtacaatgagagcaacctgccgaaaaaggtaagcaatcaaacagtggcagacccgctgcaaaacataaagggaacatactcggagtataactacagctactacctggacgggaaccagtcgtcagtaacagacatattcggaaagacaaaaggctatacctacgacagcgccggcaggttgaaacttgagacaataaaccgtaacaatcagttagaacattcaacattatatacgtatgacgaaagaggaaacagagcgttcaaaaaagataaaaacggaataataaatgaaaatgaaatatcactgatggactaccatattccgtggagctatgaagaaggagaaggagaaacaagctatgtatatgatgataacaacaggctgacataccaaaattgtgaatatgggtattgtatgagtaacgagcaaaaatatatgtatgattataacggaaacatgacaagtaaaaatacccacatatattatgataattattcaccggatgaacatttccatacagaatatgaaaacacaacaagagattacggatataaccttcagaataagatggagagttatgatggaaaagaccaaacagcaacatacgcatatgacggaacgggaacgagaatagggaagacagtaaacggagtaagcacaggacaaatatggaacaatggaaacgtaatagccgaatacggaacaaaaggaacaaagacgtatatccgaggagctggaggaaaaatagtaaagacaaaggatagagcaaataacagcagatatttctcatataacgtccacggagacacaacaaacataatagaaaagaatgcagaaagtacatcatttgcagtaacggcagcatatgaatatgatgcattcggaggtttggtatcaggaacaggcggaggagaagcagacagcaacggattcagatacaatggtcaatatacagatgaagagactggattaatatatctaagaaacagatactatgacccaagtataggaagattcactcaggaagatccaattcgttcagatagcaattggtatgtttatgcagctaacaaccctatatgttatattgatccaagtgggttggtaataactctaactggaattactgacaaaaaagatgcaagattcattgctttgcaagagttgacagacgatgaactggatgttgatttaaaaacaggaatagtatcttatactaaaagcgatgatgttgacagagaagtagctactaatcttgttcgagatataatagataataatttagattgtgaaatcatttttagtaaaggtcaaaatggatatgctagtataaaaaaagatggaaatggaaatatagtgggaacggaaattgcattcaatcctaatttcacaccaagtaattggtcatatgttgatggagaaggatatggataccgaaaggtgcctaattttatagtcttgggtcatgaattgattcattctatccatgttttcactggagaattaggaaatacacaaacacaaggatactatttgggtggtctacaaccaggtaaaacacttttacggcagggtaatgttgaggaacttaatacaacgggtattgattatgtaaaagtcataaatggcgattgggcaaatgcgacacgtgtggaagcttcaaataattactattctgaaaatgcacttcgcttggaatatgatagcgtacataaagatgatgatggatatattatgatgggaagaagggcggtttactaatgttaaggaaaatattttgtattatgatttcattgtgtatactaacaagttttggggcaggggcattagcctcagaggatttcataaatgagaaaatggtaaatgtcattaaagcagttgctccatacataactgaaaatgtgaatgaatcaataaaacgtggtgattgtattgcaacaatcatgaaagtgattggagtagaccaagatactgctgatagatatgcaaacgcatgttattaccagccagtattttcagatttagaatatgacaacgtaaactcaggatatatcattcttgctaagttcggtggtgtggctattggcatacaaagtaatgaatatgatactatccatgattttgaaccgaaaaatgatgtgacgctcaaagagtgtcttgcattcatgttacgttgtttgcatgatactaaaaatatatcatggaatgatgttttgagtcaagcaaatgaatttgggttattgaatgatgaagaatataatataattcaggaagacgatcttcttacagatgaaatgttcaaaactctattgtctcgtatgcttgttaaaaaacgttatttatattggccgatagatgatccaccagatgggacagcaaaatctatccagatcgatcaaacggacagtattcaatatattgactggattttagaaaagaaaaataaataatcaaaaacaacaagttaagatttcgttatgattcgataagatatgatagctattgcaagttataacaataatacatgttcttttataataaatgacgacaaatataaaaaaatgatgaacagaaattgatggatggtacagtattactctgcaatgatataactgtaataccattgaactcattaaaatcaataataaattgtgatatacagtgggataaaaaaacaaatgtgtatatattaaaacaaaataggcttcttataattttttaaggagcctattttttatgattacaaagacataaaatttatttaccgactgaatcatcaggtacatatccagctttgataatttcttcaataaataaatttaggtctatgccactatttattatgatgttaattaaacttttaaaagatggtagccttttaccattttctaaatctatgtattggcgtggtgacagacaacatctctctgccattttctcttgatttaattttagttcaattcttctaaagtataatgtttttccaaagcacatttttaatatgttcatcatttcactcccaatctttaaaatatatgaatattctatcaataatatattttaaactatatgttacatattgggcataaacgctgttttcagatattcttataaaatgtgaaaaatgatttatattaaaaattatcattaataaaaaaatacagcttcaaaatccgtgattgaatgtcaataaatgtgttacgaaagtcttataaactaaaatcaaaacatattaataacaaatatagatataaaataataaaaacagataaatcgcttcactacttgatataatatatcaagaggagcaatacaatgattagaattttattgtctaggaagttaggcgaacttagatggacacaagctgaccttgcacggaaaacagggataagacctaatactataaatgacctttatcatgaaatgacagatcgagtaagtttagaacagattgacttaatatgtgaagctttaaattgtgatttaatcgagttattggttggtgttcctaattctgtgtcagagttaaactcgcgtaatcgtttaggtgagttaaaaaaagacgcctagtttggtgtctttttgtgtatattatatgtactaatttggcaatcaatttgtatatgagagaaaattcatgggacgattgtgggactttcccgttttaaaataaataaatataatggaatagatgtattaaaaagaaatataactaccgaaaacacacacataaacacttaatagtattttataactattgagtgggaatgataaatattgtgcttttctatcccgaaaagtgccgattttacggcacttttcgggattttgcttttttagtggctacaaattggctacatcagccgtattttttgtagccattaggctgtcaagctgattggcgacttcgatttgcttgtttgggtataggtgactgtaagtttctattgtagtctgtactctttcgtgtcctatcaaaaatataatattaggtcaactatgaatacagccaatatggacacatatgcccaaatactggatagttacacaaatcaggagggattacaaaattcccaaatatctacatatttcaaaaaattcgctcatggatggcattgcttttcctgatgttatatgatttatatatccttgtgaacgtcccatatctaaactcatacatctttctgatacattttttctcattctcaattctgttattctttctcttatataatcctcaaacatttcgttttctccctatttacttttaaattaattatattatatttgatttttttatttgttgccatggaatggcatgtagaatataagtcatgtcatgtggaatttataagtaatggagtgtcgcaaatgattattgatgaaacgggaatagttttgaccccaggaaacttagggaaagattgtttagggaatggaaaatatttttataaaggcggaaaacctgtgccgtgctgttgtaacgaatgcgattttttactctgttgtattgataaaaattataaagataaatgcttaaaatgtacttatactcaatgccctcgttattttgcgtttcaaaataacgattttgcagcaaatcaagacttggatgaactgataagattgttctttaatttagaacctgtcttacaaaataatatgatatatttaattaatgatattttaggaatacaaaagcaatttaaagatgaaaataaaaataattagtttagtataatataatgacttatatattgaacactgcgtgttcagatgatagctcacctaacgaggcgcataaatgcgccctaccgatgttcactaaaaaacctgcttttttgtttattaatctagattgaaaacttagcttttttaatgaataaatcaatagtaactcggattatctttattcacggcagtacacaaagtcaacgggaaagtagtaaggcttttttcatcatgaagccatgcttcatgatgaaatgagcgtgggcgagcgccccttggagccgtcaggcgacctaagcgagcagcactttttctttggtgaagcgtttcttttttttgcgagaaaaagaaatggttcatacaccttattatgtaataataaaaatttttatatggggtcacatacaaagttaatttttatgaatatttacttgatatattgaacactgcgtattcagaagatagctcacctaacgaggcgcataaatgcgccctaccgatgttcactacaaacccagtcttttgagtaataattaaatggttcaaacacctattataagtaaaataataaatattatatggggtcacatacaaagttaatttttatgaatatttacttgatatattgaacactgcgtgttcagaagatagctcacctaacgaggcgcataaatgcgccctaccgatgttcactacaaatccagtcttttgagtaataattaaatggtacaaacacctattataagtaaaataatatatattatatggggttatatgcaaagagaatcggatattggatataatgaattaaatatctttagtaacaacttataaatataggaaatttgaaaataaatatctcagtttttgcgataatatacaaataatttatattgtcgcttgaaaaatatataaatatatactataatatagccataatagacatttgtctattatggcgtttttataaataaaattatctttttttaacatgttttatacatacaaaagcggaaacacagtatcttccgcttttcttaatttaaaataattttatataataattaaaagcgagaggaggaaatacagcatatagctgtataaataatatatatggaaaatcaattatttaacctaaaagacttttatgacggcaactcctttgatgattatacatatttgggcgcacacaaagcagattcagggtatacattcagagtgtatgctcctcgtgccgtgcgtgtgacactaataggagaattcaacggctggctcgaatacgaccttataaggcctaaaaacagtaatttttttgaaggaacttttgccgatgtaaaacccaatatgatgtataaataccgggtctattccactcctgacgaatttgttgaacattctgacccatacggattcggcatggagctaagaccgggttcagcatctattatacgtgaactggatgagtttaagtttactgatgatgaatggatgtctaagcgtgacgtgggctataacaacccggttaatatatatgaacttcatcttgcttcatggcggcaaaaagaggacggttcatggtacacgtatactgaaaccggagaaatgctggttccatatttaaaagaaaacggatatacacatgtggaacttatgccaataaccgaacacccggcagatgaatcctggggttatcaaaacacctgtttttacagtcccacatcaagatacggcacccctgcggaactgatgcagatgataaatcaccttcataataacgatatcggagttattttagattttgttcctatccattttgcggttgacggatacggtctcggcaaatttgacggacaagccttgtatgaatatcccagcgaccatgtggggtgcagcgaatggggaagttataatttcaactttggcaggggcgaggttcggagttttctccagtccgccgccaattactggctgaaggaataccattttgacggtctcagaatggacgcggtatcaagagcaatattctggctcggcgatgtgaaacgcggcgtgaacgagtgcgccataaaatttatacaaaccatgaaccagggactcaaaaaacgtcataaaggaataatgctgattgccgaggacagtacaaattatcttaaagttaccgctcccgttgaatatgacggtcttggctttgactacaaatgggacatgggctggatgaacgacaccctggaattttttaaacttccgcctttataccgaacaaaaagcataaacaagctcacattctctatggcatatttctacaatgagctttatttgcttcctctgtcccatgatgaggttgttcacggaaaagctacaattattcaaaaaatgtggggaagttatgaacaaaaatttcctcaggcaagacttttatatatgtatatgtacacccacccgggaaagaaattgaattttatgggaaacgaaatcggtcagttcagggaatgggatgaaaagcgcgaacaggactggtttttaaagaaatatcctcttcatgattcatttatgcgatacatacgcgacatcagccgtgtatatgtaaacacttctgcgctctataacggcgagtataacagcaagtctttcacatggcacaaaatgggaaccaaagacagagcgctggcaatatacgaacgaggctgcggcgaagacggcagatacattgtttttctcaacttttccgatgtgcccgttgaagaatttgagtttgagatagaaaatgaaatcagcctagaacttataataaacactgaggctgatatttacagcggcagtatgaaaatcggaaccactgaaataaaggcagaattaaccgaagacggaaacacaaatatttcagtaaatatgccgccgttctcaggacaaatattaaaaatcaaagaattaaccgggcaaaaatagtttgcttattttccatatttcgggaacctaatatatttataagagtctaaaatatataaccaaattttaaggagtgataatatgaaaaaacttatctctactgtattatccgtaatatttttgttatcaatattacaaatttctgctttcgccttaaccttcagtgattctgattacggtgacacaaatctcaatgcagctcttgacagattaacagattccgggattatcatgggcgacgacacaggcacgttcagacctttcgatgaattaatcaacagcgaaatggcagttattttggcacgcgccgacggatacaagccgtacacggctgcagagcaaaacggctcatatgcggacactgctgttaaccacctgtacgaattgggtatattggactcaaacacaaatacctttaaccaatccgaaaaagtaaggtttattgattatatcacagcgactgttaaacttatagactataaaaacggactggatatcagcacggctaaaacttctgaagagtatttgacgaatgcttatgaactaggtcttttatcatttattcctgattatgagcctgaacaattcataacaagaagagacgcgtcggttgtaatagatttggctatgggattaaagctgacaaacaatgaaacgatgtacctcttgcttatagacgggaatattaataaccacccggtggtttcatccgctccggttccaacagcaaacccggaaagtcaaaatgcttttgcctacaatatgaacagcaaaatggacaagagcaagaactatatgttttcgccgctttcggtaaaaaccgctttggctatggctgccaacggcgctgacggcgaaacaaaggctgaaatactcgacactctaaaaatcaaagacttaaacgaatttaatgccgcaacaaaagcattgattgaaaaatacagcggcggttttgattatgcacgctacaatgagctttctgacaaattaaacaacggtgactatagcgacgctgaatttgaagaatacaaaaaactttctaacgaattaagaaacggcaagagcgttgaatttaatattgcaaattctatatggctgaataaagattattacgcaggaagcgacgcggcgtttagtcctgactttgaagccattgtaaaagacagctattacggcacttctgaaacagtaaacaacgatgacgctgttgaaagaataaacggctggacgtcagaaaagacaaatggaaaaatacccactataatagaagacagcggctttttggcagaactgataaatgccgtatactttaaagctccatggcagtatgaatttatgactgagaataccgccaaatctgtttttaacaatgcagacggcacgcggaccgagactgattttatgaatgatagaggttattatgatacatacgccgatgaaaatgttcaaatagtggagcttccatacaaaggaaacaaaacgtcgatgtatatcagtatggataacggcggaaatatcgattatgataattatctgtcaaaactgagttctaattatataaatctgtctataccgaaatttaagatagaatatgatgagaaaatcggcagtacaaacggtgactgcttgttaaaacaactgggaatcaatacggcgtttaaccaaaacacagctgactttaagaacatgattatcaatctgcctttgggcgaaaacgtgtttgttaatgaagtaatacataagacgtttataaatgttgatgaaaggggaaccgaagctgcagctgtgacttcaataggaatggctggttctgctctaccgcctgaaccgattgacttcacaatagataaaccgtttacgtttataataatggacaatcagagcggcgacatactatttatgggaagataccaggcagtgccggctgaataaaataaataagcatatataaaaggggagtttttatatgaatgaatatccgatatgtcaaagctgcggtatgccgcttgaaacaccggaacaaatgggaactgaatctgacggaagcagaactcagaaatactgcgcttattgttatcaaaacggagcgttcacaaatgatataactcttgatgaaatgattgaaagcaaccttaaatatctcaaagaatggaacaaagaaacaggggaagatttcactgctgacacagcaagaaaagagttacaagcctatcttcctacacttgaacgctggaaaaattaatttttatagtatagaaaaagcccaaaaatgaagcgcattcaaattattagatttttgtctaactttttgaattctgctcataattgggcttttcttatttttcattatacaaaaaataaaataagtatttgtccttgaccgcacttttgactgcactctcatgttttacataagcaaaacaatgttttatataaaaaacatataggttataaaacaccggaattgtgtattgtataacactccgtgagttatttataaaacaactttaattcgtttcttcccaattaattaagaagagtaccgactgatagaatttataatatattaattttatacttctctctgatattatatcaacatattaaaattggtatttatactcaagagtttttattataccataaattttacagcaaggcaaaattggcgctttcaattaatgacttcatttggcataagcaaaacgggtgtccttcagggtcaagcataactctccagccatcagagaattgtttgcttgcgggggtggctccgcaagcaatcgcatattgaacagacttttccaaatcattaacagcgaaatccaaatgcgccatagtttgctgtgcgtcaggctccgccggccatacaggcggttgataatcggtatttttttgaaaagttattccgggatacgcgccttgttccgttccaggagcgcccacgcaagcatagtcatcgtcattgaatactatttcccacttaagcaaatccgcataaaactttgctaattcgtaaggttccttacagtctactgtaaatgcgtacattttaatttttaattcatcgctcataatatgttcctccaaattaagaatattttgtatatacttctattgtgttaaagcaattttaatagaaaaggttcaaatcttaataaaaagatttataccttgtgtatttataatggtcttaaggtcgaacttgaaccgacaaagcacacaaaacttttttattaaatttttccctaaacaaaataatcaacaaattaaatataccataaatattattttgctgcaatacaaaaaatatattttatgatatttttcacttctttcatttttattgatttttttcctctataacatttgcattaatatctaaaggatttcaatttaaaaaatcttttattaaggcttgttgataaatgttaatattatgtcttaccatttcaagtgagctgtgcataatttgcagttcagcaagagagccgtcacttaatacaaaatatttagtggatgtatgcctataaatatgtatacagtttttttaactcctataatattaagattttaaggaaaaaagctaaaaaaacagacaccttggttaaatagaaaaaaaccaaataatcaaggtgtctgacaagttataaaaaacattttaacgaataaacaaaaatgagacaaactccataataacaaagggcttgtctcattctcttaacatttggtgacccatcggagattcgaactccggacaccttgattaaaagtcaagtgctctgccaactgagctaatgagtcatatttagttttttaatggctgggccggcaggattcgaacctacgaatgcagcagtcaaagtgctgtgtcttaccgcttgacgacggcccagtatttggggtgggtaaagggaattgaacccttgacctctagagccacaatctagcgctctagccaactgagctatacccaccatatttaaataaaaagctggcgcgcctgaagggacttgaacccctggcccactgcttagaaggcagttgctctatccagctgagctacaggcgcataaaattgttataaccgcttgattgtggaagcggttataaaggtggagcgggtgatgggaatcgaacccacgcaatcagcttggaaggctgagattctaccattgaactacacccgcgttcaatttttgcgactttgatattatatcaactatataataatttgtcaagaaaaattttcaaaaaattttattttttttataaattaacattataaacaatttgggtgtagaaaataaaatgttgtttgtgcaattactataacttttgacagcttttttatgggtctttttaaagaattttgattacagtttgtaattgcaatacagtttcttatattttctgtttaacaggttcagataaaattctaatttaatctactattgaaatctcattttagtctagtcggattttaaacttttaatacttcattatactaaaaaaattgaaataattaaaacaggcttaaaataaaaaatgaattaaaagttttttgttataaagctttaaaataataacaatataataatcaataaagctcataatatcaaacttaatgtttttgttattgatttgttttataactgataacaattaaaaatttagtctctctttaaaatacttcaataaaacaaatcagcaaaataaaaacagtataatctcagtaaatagaagcataacgtatttatagtatgtgtttttgtgctgggttatattgactttgaggcgattctggtatataatgtatgacggtagactgatttaggtctactgtttatattttagtattaatttgaattggagaattttatatgacaaagagcgaaagcggcggaaaggcagttaagtcaatcagtattatggcggtgcttatacttcttgcaaaatttatgggtctgttcagagagatgcttattgccgggatttatggtcagggctatgcttccgatgttatcaacagcgcgacccaaattccgcttttattttttgatatggtgctgggcgtggcaattttatccacctttgttccgatttataacaaaaatttagaaaaggtgggaaaatccggcgctgacgcttttgctaataattttatcactatagtgggggctgttgcagttcttgccgcaattttggggtcggtatttgcccagcctatagttaaaatgatggtgcccggctatgctgaagtcccgggtaaggttgaagaaactgccagattgcttcgtgtcctttttccgtctatagctttcactgctattgcctatgtggttgtcggaattttgcagtcgcatggtgagttcactattccgtccttgataagcgttgtatcaaacggtgttatgatagcatatctgcttatatttggggacaagctggggcttatgggcgtggctgtatcaatgctggcggcgtgggctcttcaattgtttttccaaattccatggctgattaagaccggatataggtataaacctcggtggaatattaaagatgggagcatgaaagaggtagcgcttttggcgcttccggttcttataagctcctgggttcagccgctttgcaacgttataaatatgtcgtttggttcaagtctcggaaacggcgctgtgtccgctctaaactgggcaaacaagatatatattataatggttggagtgtttgcttacgcgataacgaattttatttttcctaagttatcaaggcttaacgctgatgacaataatgaagcctttgcgtcaacaacaagaacgtcggtcggctggatagtttttataatcactattgtatcagccttgtttcttgcactttcaagccctatcattaaagtcgtatttgagcgcggagcgtttaccgctgaatctaccggtataactgcgtctgcactattcttttactcattcggaatggtcggttactctatatgcgaggttttgaataagagcttttacgccattcaggacggaaagacgccaatgttcacatcaatttttggggttgtagtcaatatcgggtgcgccgctttatttgttctagtttttgatataggaatagaagggctggccctggctagcgctataagctcaacggcaatcgccgcagcattgcttataatgataaacaagaggcgtgaaggcgtgataacaggcacttttatgctgaacctgctgaaaactttcatctgcggtgtgctcgcgtttataacagccaaatatgtattccttgctgtcgacggcgtattgggaacgggtatggtaatgactttagttaaactgtgcgttgcttcactgcctgcatgtgttgtatattttggtttggctcggattcttaaagtgacagagatgatgataggaatgaagtttatttttggaagaaaacatgattagagggatttgttttaataaaaatactttataaagaaaggaatggtaataggatatgaatgaaatgggatattttcaatccttttggttgttcatttggggttacataaagcagagctttgtttataaaatcctccgtaaagtgtacgacggtatttcgggcgcttggaaaagaagcagaataaccaacttttttcgtaaccagcatttttcttcggatgttttaaggaacggtgctgcggcaaggattttgaggtctccgtttacgtttttcgcttggcttcaaagaaagtattgtgaaaaactgaaaaataagatagagacaagctgtatagtaaaagtctgtgactgttatctaaagaatattctggcgcttaataccagattcatcggtattttactggttggaataacactgggagccgttgttcctgcgatagcaggaggagagcagacaaatctgctggtatatgcactgctgatattaggagctgttttgtctgtcgccaatgctaatttaaccgagttcctgtcgggttcctggataatgagaataattgagcatctcagcggaattgattttaagtatgacatttttgaaaaggacgttacaaagtcaaacggacgtttgtggcttgcagccctgattgggtttgccgccggagttgcagggggatttacaagcccgctttatacgatagttatacttggaggcttgtttgttgtctttctcattctcaggtcggttcaggccggagtttatctgactgtatttcttgcgccgctcatgcctactatggctatagttggtcttgtgggactttgtctgttttcagttcttgttaaggctgtgtcagaccgaaactttaaatggcgttttgaaggcgtaggctttttgatgcttgggttcctggctgtatatttgtttgccagcctgaattcttttgctgtgattaacagtttgagtatttttggaatttatctgttgtttatggcgttttattttgttgttataaacactgttaagaccaggaaacagttgtttgacgtgctgacagtgtttgcagtttcaggcgctttggtctgcctttatggcgttgcccagtatattttcggctgggatacgtctgccgcatgggttgatgaggaaatgttcagcgatataaaaatgagagtttattcaactcttgaaaacccgaatgttttgggtgagtatatccttttggttctgccggtctgcataggcttagtttggcagaagccaaaaaaacttgctaagctggtatatatagccatggcaggcattatgtttgcaactctgatattaacgttctcgcgcggatgctggattggtttcatgataaccgcaggtctgttcgttacgtttgtatgcggaaagatttggggattggcgctgatagctttgccgttcctgcctatggttttgccggaaagtattattaacagaattgccagcgtaggagatatgaaagattcgtcaacctcgtatagagtatatatttggtatggctcgctggcaatggtaaaagatttttgggcttcgggcataggccccggaactcaggcgttcaagtcggtatatccgttctattcatacagcggtatcgttgctcctcactcacataatatgttcctgcagattttagtcgagtcaggaatagtggggataggcgttttcttaaccactattgttatgttctttaagaagctgattaacggttatcagtcaacatccggcaaaggcagtaagctgggcgcaatgattgtagcaatcggcgcaggagttgccgggttctgtgttcagggaatgtttgataactgcttctataattaccgcgtattcttaatattttggatagtgctcgctcttggtatcgccgccgtgtatatcgctaaaggcgaaaaagaggaatcagcagtaaaggcggtggaggaagagtgataaaagtggtagaggtgtcctctgactcgaatatcgggggagcgggaaagtgtataataacttttctcaaatattttgacagaaagcagtttgacgtttctgttgtcctgcctaagaactcactgctgaagccggaggcggaagctttgggggttaaggtttatgaaatggacaacctggccgaaaaatcgctggatatgaaggctattggaagcctgaaaaaattgtttaaggaaataaagcctgatattgtgcatactcacgcaagcatgtccgccaggatagcggccaaacagtgccgtataaaaacagtctataccaggcacagcgtgtttgagccgtcaaggaaaatttctcagggccccggcaaagcggtaaacggctggattaataatcataccgcggacaggataatagctgttgccgaggcggcaaaggataatctgaccgccacgggcgtcagcgctgataaaatagacgttgtattaaacggcgttgaagcgttgaagccggcggctgatatacaaaaagtcaggtcaggatttgggattgagccggatgaaaaagcggttgcaattgttgcgagactgaccgaggtcaaggggcacagatattttattgaagccgcaaagattttgaaaaagcgcggagttaaagcaaagtttctcatagccggtacaggagatacagctgaggcgctgaaacgtcagattaaaaacgagggcttgattggaactgtcaagatgctgggatttttaaatgatgttgagcctttgatgaacgctatggatattcaggctaattgttcattcggtacagaagctaccagtctttcactgctccagggaatgagtttgggaaagccggcggttgttaccgatttcggcggtaatcccggtgttatacgggatggtgaaaacgggtttatggttcctataaaggaccctgccgctatggctgacgctttgcagaagctgatgacggacgagagtttgtatgaaagtatgagcaagagaagtttagagatatataacgagtgttttaccgccgaggtgaacaccaaaaggattgaagatatctatttgaaattgcttaattaaacggtataaaattaactattatatattggaggaaagagatatgaaagcaaagtttaacgcaatagactttataattattttggtcattgccgcgattattgcagtcggttcttactacttggtgtccactatgggcggcggaacaagcggaaaatcggcaggcggaaatgttaaagcaacgtttgaagttgaatttgccaacaaggaagaatatttgaccgagatgccgaaaatcggcgacaaggttactgttggcgttaaggaaaagatgccggctacggttacagatgtgagaattgttccggctgaaacggtggcgtatgatttgaatcagggaacggcacagtggcaggagatacccgggaagtatgacatttatgtaaccatggaagctgacgcggtagacaccgggaagcagataaacataaacaacagtccgataagggttggagattcagacgcggttcgttcaaagggctgggctggatatggttttgtcacacagctgaacgtaagcgagtagtgtaaatattttaggaaaggaagatagagattatgaagaaaaagagtacatttgcaaaagatggaaaattatttggaaaaatcagtattattgacataatcgttgttctgtgcgttatcgttcttgcctttggtatttatgcgaagttcacttcaaacagcgacgcggtttcttcatcagagaaggcgaagatagagtatgtatacaaggtaaagggagttagggattttacgattgacgcgtttaaaaaaggcggacctgtatatgaccaggacacaaaggaatatatgggagaggtaacgggtgtgcgctctgaggatgccgttatggaagtaagtttagtagacggtacatacaaaagtcttattgtgccgaagaagtatgatgtatatgtgactattcaggttgacggaaagtataacagcttaggtttttatacgaacgagaataggtatataggcgctggctcaacggttaatgcgcagtcgaagtatacgacgacaggcggagagattgttgaggtaagacaaatagaggaataaaaggggatatattgccggcttccaaaatggaagccggctttttttatgtcaacttatatattttttatatgggtcatacatatagtatatttactttatctcctgttcgagtttattaaatatttctgatgtaaaaaactcctccaaagtcatatccaaaccatcacataacttcttaattaacactatagaaacattcctgcgagtttcgtcaaacatactataaaccgacgaaggcgtaacttctgcctttgttgcaagttcatttggctttaaatttttatattcacatatatctttaaatctctcaactaccgcatctttaactttcataaaaatcacctcaataaaattataaaattttatattcaccggcgtatacgcacgcgagtgtaaggcgcaaaaaattatttaatttcttgttcgagatttgcaaaaatatcagaatcaaaaaattttttaatagaaattcctaaaccgtcacacaattttttaattgttaaaatagatacatctctacgtttatcattaaataaactatatactgaagaaggagaaataccagcacgtcttgctaattcgttcttttttatattgtctttttcacataattcccaaaatcttttaacaactgcatcttttgcattcatattatcacctcatataaattttacaattttattcatttgtgcgtatacgcgcttgcgtgattttagaaactatgttataatatacgcaaatgcgtaaccaaatattaaaaggagagataatatgaaatgttgtttttgtggtcatgggaggtattgggaagtaccaaattcgattgttgtattgttacttgaaactattgaatatttaattaactatcgtaatgttgatacgtttatttctggaggtatgggtgaatttgatagactgtgtgagtctgctataggcgaattaaaaaaatcatatcctcatattaaattatttttatatattccttatatgactaaatatctgagtaataatatggaatatctacataaaaaatatgatgagataatatatcctgaattagaacaggtatactataaatcagcaatacaaaaaagaaaccgtataatgattgatgaatctgattttatggttgcgtatgtaagaaatgataaaggcggagcaagacaaagctataaatacgcaaaaagaagtaaaaaaattaaaattataaatcttgtagaatatatataaatatcttaaatacaaatactgtcagcacaagaaaagaggatttttaatggataatataaatataactgaatttatcggggatttttttgatgaagaattggatgaatatatatataaaattttatataaactccaaaaagaaagtaaaaaatatagcgacttaataaataatgaagaaaaaataaaacaaacaaatgaaaccttacgtcaagttttggaatgctcaaatccacaaaagttaaatgctgaagaatgtaataaaattatagaatttatagaaaataatagattgaaaatgtttgaagagtgtagagcttcttatattcaaggtatattggatggactttctaaaagaaaattgttataagttaatataacgaaatataaagatatataaaattgaatgatgataataagttcaataaattatttgattatatgactgggttgatatattaaatataagagcttttctttgtatatgaccccatataatatatattattttacttataataggtgtttgaaccatttctttttctcgcaagaaaaagaaacgcttcaccaaagaaaaagtgctgctcgcttaggtcgcctgcggctccaaggggcgctcgcccctgctaatttcatcttgaatctgcgtttcaagatgaaaaagccttgttactttcccgttgactttgtgtactaccgtgaaaatagatatttcgagttccaattgatttacttatcaaaaaacaaagtttttagtttaaattattacacaaaaaagcaggttttttggtgaacatcggtaggtttgcgatagcaaacgcgttaggtgagcaaacatctgaacacgcagtgttcaatattaataaatatattaatttattttctagtatgtgtgttgatgtgaataaagatattacgagttccggttgatttatttatcagaaaaacagggttttccgtgaacatcggtaggtgtgaccccacctttggtgggtgtgatacaaagtgacttattttactatagccttcaacgtcaataatatgaatactcaaaattggaaagctccaattgactacatcaactcttttatcaatttcggtgaactcttttaatcttttttgtaacacatcattgacaaacctacagatttaaaattttgctgcaattatttaaattgaaaaagtacaataaatctggtggaatattaatgtcaattaaaataaataaaatttttatataatttatcatagaataattatatatttaatatctaatatacggtgtatatggtgaactgcggcaggtgtgactgtgaccgcacctgaaaggcgcgtgtgcgccacaatatctctttaccattaaacctaaaatgtcaataaatcacttagttgtgatattccccacctaaggggtgggtgtgatacaaagtgacttgttttggttagacgacaatgtcaataaattacttagttgtgatgtattgcgcatttatgcgccgcgttaggtgagctgtcatctcacgcgaagcgtgaattacttatggcagagtatcataatcctttttattactaattttccatgactgcgcgccttacgaggcaaactacgtttgccctaccgaagcttgcgaaaccacatttttatatgatttattatagaataattatatatttattatctaatacggtgtttatagtgaatatcgggaggtgtgacaccaccattctggtggggtcacagtcacagccctccgaagcttgcaaaaccatatttatgtaatatttttatatacagtttttctgtttaggtttcttttaacttttcaaatgtctaatgaaatacgatagacataagcacataattccaacatatatttaatattgaataaatttaatcagagctggtggggtttaaatgaaatggtttaaagcggttgtcgtcttgattctgtgctatgtgacattttgtttggttatgtttcccgatgcttgtataacagcggtgagcggagcgctgaagttatgcgtcactgctgttatacccacgctgtttccgttctttgtatgcagttcactgcttatagcatttggattaggcgaatttggaagcaggtttttgagcggagtgatgagaccgctttttaaggtcagcggagcgggagctgtggcggtaattttaggtgtggtgagcggctatcctgtgggtgctagctgtgctgttgaactttataagactggaaagataacaaaacctgaggctgaaaggctgttgagtttctgcaataactccggtccgctttttattataggaacggttgggtttgctatgaattccagcgtcgctttgggcggagtgctttatataatacatatcacggcggcaatatcggcaggaattatatatgcgaaaatttcatcaaaaaagaatattgaaaataatctgataaatccgctgatagttgatatgtcgccggataaaaaacctaaaaaactgatagagtttttcggtgatgcagtgtcaaaaagcgttataactattttgaacgtttgcggttttgtggtcttttttgctgtggtggaaaagactattcctgagtttataggcagtccttttatcaattcattgctggagataaccggcggtataaatggcatgtcttctatgggaatagaaccggttttgaagttttcattaatttctatgttcctggctatgtcgggcttatcagtgtttttgcaggtgtcgtctattatatcttctgcggatatatctccaaagtcatatgcagttggcaagctgatacatggcggagtagcgtttattttaacatatgttgtgatgctggtgttaaagctgaccgggtggctccagcagataattggttccggcagtgctgcgtcagcttttgccatgagtgagggctggatagtaccggcggcgtttaacagcacttgtccgcttgactctgttttgcagtatgcttgtcttatggcaggttccgcactctggtgcctgctttctatggcggtactggcgttggcttctgcctttttctgcaaggattgacataatattttatatatggtatcatgcttaccaaaagagattattatggaattttgaggtaagctaaatggcggataaaaatgaacgatccgtatatatcggcgctgtcagcggatgtaatgtgatttccgcagaaaaggcggtggttcctgccaactattcagccgtcaactccactaccggtcatgggctgatggcggaggaagctttgactgtgatagacaaattcagcggcagaagcgctgaggtggtaggacgtacgaatataaagaacggacctgacagaatggttgatggaactgctctgcaaaccaagttttataattccggcaagggatgcgttcaggcgtgtttcgacaaagaaaacggcggtctgtaccgatatttgaatagtgacggcagtccgatgccggttgaggtgcctaaagatatgtatgacgacgctgtggaggcgtttagagcaaagatttctcagggtaaagttcccggggtgacagatgttaatgaagcagggaattacgtgaggaaaagtgatttgacttatgctgacgctatgaatctgtgcaagccttttactgctcagtctctgctttatgactgcgcaactgggataatatattgctcgtttgcgtttggaataagcgctttggctgttttcattcttgagtatagcagaaacggcagaaatgagaaaaaggctttgttttccgctgtcagaacaggagctaaggtctttgggctttcatatgttactcatattctttgttcgcagtttgctagaactgaactttttaaatctgtttgggatattaccggatacataaacagtgggggctttttcggcggagcggttcagtctgtaaacaatgctgtgcgtttcagcgtcggcgacagtgtttcttctgtaagcgcttcgctgacgcagttttctaaaatgttcagagccgggatttttatgaatctgtttaccatgcttatatttttggttcctgatactgtcagagtatttgtcagggatatttcggggtttgattatttaaacagggtgtttatgatagttatatcaagaattttttcaacagtgttttatataacagccgctttgatgcttggaagtttcagcagtctgccatatatggtctcaatgactgtgtgcctggcggcttcatgtatcggaggaatagccggacgtgctgttgtttcaagactgacagaaagatttatgatacttcgggcttaaactaaagaaagaggagtgaaatttttatggcttcaaaatgtgatgaatgcgttaactatgagtatgatgaggattatgagtcatatgtttgtttagcaaatttggatgaggacgatatggcgaaatttatcagcggaaattataatgaatgtccgttttaccgtcccggtgacgaatacacaattgtcagaaagcagaattgatttagggattaatatctatgtaagtgaatattctttaagttgaatattttaaaatgaatttattattacttaacagagtttataatattatgcttgaatatgttatgggattatcttagatttgttatgacacggaagttatgtagtgtcaaaagaaaactaggcagaaaatataagagcgttgtttggtaaacatcggttgggagtgcgtatgaagtatgacgcgtgaggtgtgcagtcgctgaaaagtttattatttaataggatcatgacaaattgtttgtatatatgttcacgctccgcgtgagatggcggctcacctaacgaggtgtgcgcaagcacaccctaccgatgttcactaaaaacactgttttttggaatattgattttaaaaaatttttataaataaagtggttttgcaagcttcggagggctgtggctacacttttatttaaaagtgtatgttatataaaccgtataatgtgatacaaactataaatgccaataattaacttagttgtcatataataatcaaacttagatgtgatgtgcaaacgttgtttgcctcgtaaggcgcgcagtcatggaaaagtttatataaaaaggattatgttatactgttgtatatatgttcacgctccacgtgagatgacagctcacctaacgtggtgtgcttgcgcacaccctaccgacgttcactaaaaacacggtttttggaatattgattttataatttttataaataaagtggttttgcaagcttcggagggcaaacgttgtttgcctcattaggcgcgcagtcatggaaaagtttatataaaaaggattatgttatactgttgcatatatgttcacgctccgcgtgagatgatagctcacctaacgcggcgcataaatgcgccctaccgatgttcactataaacactcttgattttttgtctggtttgttatatcttattcagtattttttcttggattttattgcggatgtttataaggtaaggcttgaaaaggtatgtgttatttgttttataatattgatgaggtactgagaattaaagtatataggacaaaaacgttctgaactgtttaacactaatttatataaacgaaaaatgtttgcggcggcgtgtaaaactattcacgccgccgcgttttttattttatatttaggcttgtaaattacgtttaaaagaaatataatagaatcatataatttaaggattgattcatggtgatagagtaatagataagacgtcttgttctattgcagtgaaatgtttttttatatgacagcatattgcgtgaaagatatgtgatatattttaattaaggttgatgccggtaaagcatcaatgcgtacagtagtctgtgatactattgtgaaaaacaataaaatattttgaaaaacaatagatatataaaacgtcttattttctctgacgtaatattttatttatgtgtgctgtgtgtagaaacgtaaataatattttatatatgctggttttaaaataaagcattacataataggcgctttttattgcgaaacaaaacgaaaaccagcagatgatggtttggtaaatgaaatccggagaatattccggcagagatcgtatataacagaaagtgcggtaaaggggattttaatatatgaaacggatatttttagttgaggatgataaggctattgctaaaaatcttatgcttctgctccgctcagagggctacacggttactcatgccccaacacaaagcgaggctattgatttggtcagcgtgaataggtttgatttggcgctggtcgatatttcactgcctgacggaaatgggtttacggtttgcacggaaattaaagaaactcaggatattcctgttatctttctgacggcttcgggggatgaggccagcgttgttacagggcttaatatgggagcggacgactatatcaccaaacctttcagaccccgtgagcttatagccagaatcaaaaccgcgctgcgaaaaagcagccgttctgcgtctgcgtttgaaatctgcggacttaatgttgatactgcaagcggcgttgttaaaaaagacggcagcgagatttttctttcagctttggaataccgtttactgttggtgtttataaataatcccaaaagtattatcacaaggggcagattgcttgacgaactctgggacgcggcaggtgagtttgtcaatgacaacacgctgactgtttatattaaacgcctgcgtgagaagatagaaaacgaccctgcaaatccgcagattattcttactgtacgtggaaccggctacagattgggggacggatatgtttcgcaatagggagtttaagaggttttcagttctctttctgattatagctgcggtttccgtaacgtttagttttgtatttaatacggcggcaggaattatttctatcatttctgcagccgcttttggcacggcattttttatctttaccaaatcgagatatgagagtattgcgcagatttcagaccaaatcgaccttgtgcttcacaatgccgaccaaatctatatcagcgaatctgaggagggagaactttcaatactgcagagtgagataacaaagatgactatgcgcattcgtgaacagaacagcgctttgagaaaggaaaaggaacatttggcggattcattggcagatatagcccaccagctccgcacccctctcacgtctgctaacttaattctgtcattgctggagaatgctcccgatgaaaatgagcgaaaaaatttgatgagagaaacagaagaattatttgtgcagatggactggcttttgacaactctgctgaaattatcacgccttgacgcaggaattgtggtttttcaaagcatacaggtaaacgtgagcagtctgataaaatctgcggtccatccgtttctgatttctatggagcttcacaatattgatttaaagtcagacgtaccggacggcataaaaattataggggatttaagctggctttctgaggcggtacaaaatatacttaaaaactgtattgaaagtgtgggcaataatgggaagatagaaattagctgcactgacaatccgttatttactgagatttccattcatgacagcggagcaggttttaaaaaagaagatttgccgcatttgtttgacaggttttatcggggaaacagtgaaaacgcctccggttatggtataggactggctctgtgcaaaatgattatagtgcggcagggcggaacagtcagtgcaaaaaatcatcctcagggcggggcggtgtttactattcgtttcccaaagtgacaaatctctcacctaaaagtcacagagatgtaagctgaaggttctattatatgggtagactaagaaaaaggaggctcacataatggagttcttaaaagttgaagatttatgcaaagtttatggcaagggtgaaaataaggtcaccgcgctcgaccatgtttcacttacaatcgaaaagggtgagttcactgcgattattggttcttcaggctccggaaagtccaccttgcttcatattatcggcggcgtggacgtgccgaccagcggaaaggtatatctgaacggacaggatgtatatgccggaagcaatgaaaagctcgccattttccgcagacggcaggtagggctgatttatcagtttcataatctgattccaactttgaacgtggtggagaatatcacactgcctatacttatggacaagcggaaggttaacgaggagcgtttgaatgatttgctcggcctgcttggtcttcaggagcgcagaacgcatttgcctaatcagctttcaggcggtcagcagcagcgtgtttctatcggcagggctttaatgaacgcgccggcggttatgcttgccgacgagccgacaggaagcttggacagccataacggccatgagattatcaaactgctgaagctgagccaaaaaagatacaagcagactcttataatcgtaactcatgatgaaaatatcgccctgcaggcggaccgcattatcggcatatcagacggccgggtagtgagagacgagagggtggtgcggtcatgaatattttcaacaaggtcactctgcaaagcatgaaaaaaagccgtacccgtaccatagtaacaattatcggtgtcatactgtcagccgcaatgataacggcagttgccacctttgccgtttcactccaaaattatatggtcaacggggcaattcagaaatacggaagctggcatgtcggttttttggatgttccgccttcgttcgctgaggagcggacaagtgatgataaggttttaaattctgtatcaattgaaaatataggtttcgccaaactcgacggcggaaaaaatccaaacaaaccatatctttttgtagcaggatttaatgaaagctcttttgataatttgcctataaaactgctttcaggcagacttcctgaaaccagcggcgagattcttattccgcagcatcttgacgaaaacggcggtgtgaagttctcggtaggagatactgttacgcttaatgttggaagccgtgtgccgaataacggggaacttggtaaaaatgccgaaacagacggcaaagttaagctttcggtcaaggcggagcattcgcttgccgataaaagattcatagaccgggaggagagactcggtcagcatgacccttatattccggaagaagagacgggaaaagcaggggaaacatttgtgccggaaactgagagaagttacactgttgtgggaatctgctcaaggcctgcatttgaggaatattccgcgccgggatacaccttaataacagcgtcggactccgaagcaacggcagacagtctcagtgtgtttgtgactcttaaaaatccgtggcaggttcatagttacgcaagaggcacggccgggaatgtggcttatatttttaacgatgatgtactgcgttttatgggcctttcggatgataatttgtttaacgcgctcttgtactcaatcggaattattttgataatcctaatcatgctgggctcggttttcctgatttataactcattcacaatttcactgaatgaccgcacgcgccagttcggaatacttatgtctgtgggagccacagaaaaacagctgaggaagtcggtgctgtttgaggggctttgcattggagctgtgggaataccgattggtattattatcggaatacccagtataaagctggtgctttctattgcggcaaaatattttggcaatgttttgtacagcggagtgcctttgaatttgtcaatctcggttccggcgcttatagccgcggcggtgataagtttggtcactatcctgatttcagcatatattcctgcgcggaaagcggcaggtattcctgttatggagtgtatccgccaaacaaatgatgtcaaggttgaacctaaagctgtaaaaacgtcaaaaatctcagagcgtttatttggtttggaaggcgttttggcattaaagaattttaagagaaacaagaagcgttataaaagtattgtgttgtcgctcactttgagcgtggtgctgtttgtggcggcaagctcttttggaatgtatctgaaaaatgcggcggagagcaccgttgtaggaactgactatgatttatgtttctattcacaggatattgacgaggaagaaatgttcaggctttatgacgaattcaaggttgttcccggagtttacgacagctcatatcaggcaatttcatcatattcatgctcaataaaaccaagtgatttttcggatgcttatctggaatcaacggattatgaccgagacggagaagctatgcctatggatattcagtttcttgaagacagcgtatatttgagctttattgatgagttgggcttgccggctgaggaatacacgggtcagaacgcaaaaatgattgctgttgccaaagctaaaagagagagcgccgagcaagaaggcaaaaccgagctgattgatatgtttgaaagccgggatatgaattttcagattattcccgaaaccaataacgcgccgcaggcagagcagggacagaacataaacataacgtttgtagacacaattccgactgacactcttccaaagaagccgtctgaggttaaaccatacgtttttatgggggttgcaccttatcagctgaaagagagatttgttaccaaggacacccatacagaaatgggactgacattcttatccagcagcccgtctcaatcggctgcagagatggaaaatataataaataattatggtatttcatctgattatactctttataacgtgtatgaaatgtttgaacaaaaccgcaatattatctttattgtcaatctgtttacctatgtatttatactgatgatttcactgatagcggtagctaatgtgtttaacacaatttccaccaatatcaggctgcggagaagggagcttgccatgcttcgctctgtgggtatgtcggaccgtgaaatcaataaaatgatgaattttgagtgtatgttttatggaatgagaacgctgatattcggagtgccgacagcggtgcttatctcctggctgatttataaatttttatttgtcggcggagcggaggtgagttttgtattcccgtgggtcagtcttgttataagcgtgcttggtgtgttccttgttatttttattactatgctgtatgcagtcagcaggataaaaaaggaaaatattatagatgccctgcgcgacgatatgacttaatgcggtcaatatttgtttgatttatttgaaaatcttgtcagcatacgtacggctgagattatttaatgaaaacaacagcagagtttaatatttttatcagtttgccccgcctattttggcggggtattttaatttaaatatcattatcacgcaaaatttgcatatgatgtattaaaacaaataaagggctgatagaatgtcaaaaaacaaacctagcaggaaaagagacaatcagaataaccaaccatcgcttaaagaaaagcttgcagacgcgattgatatttccaaaaacgtcatgctcggcgttcctctcgtgactatggttggagacagagagcttaccattgaaaactatgttggcataatagaatatggagaggatattatcagaataaaatgtaaggcggttaatgtaagcataaccggaaaaaatttagaactaaaaactatgactgatgaatttttatatattaccgggaggttcaaatgcttttcatacgaatactaaattacataaaaggttatcttattattacaattaacggagtttttgccgagagattcataaacatatgcgtccacagaaatattctgatttgggatgttagccgaaaaaacggcgggtttatggcaaaaatggcaacaaaggatttttataaggttcgtgatattgcgcggataacaaactcaaaagttcggattaaaaggagacagggactgccttttttattgattagatacagaaacaggtggccaatattttttgctttaattctttttatagctattgtgcatttcacctccacccatataatgagcgttgatgtggagggaaatcagaggataccgacagagcaggttctgagcgagcttagggatgttggggtaagctttggaaaacgcgtaagcggactgaacgctgatactataagaaaccaaatgataattaacaatgacgaaatagcgtggctgggcgtaaatgtccgaggctccagggtgtatgttgagataaccgagaggatagacactgagagcgtgccgcacctgacggaggaaaaatgcaacctggtcgcttcaaaggatggggttatagaaaaacttgaggtaggccagggacagactatggttaaaaagggcgacggagtgcgcgagggcgacgttcttgtcagcggcataatggacagcgcatacggcggcttcaggttggttcattcatacggcgaagtatatgcaagaactgagtataccgccaccagggaataccaactcaactatattgaaaaggaatacagcggtgaggaaaaggtcagatttggtctgaatctttttggaaataagatagagctgtatccgccatcgatgagaccggacgataattatgatgaacaggcggaagaatatgtgtatcgcggaagctggcttgggaataatgttgagttcggaggtgttgttgaaaaatttcttgaatataaagaggtggaaaagcaaagaactatacaggaggcggttgagacaggcagaaaggaaatgacagaggaagttgaaaactctgtgcccaaagacgctgagataattgcaagaaaaacagaccataatattatttccggggatgcggtgtctgtgaccgtaacctatgagtgcagagaaaatattgcaaaagagagcgaaattgataaaagtctgattgacaaaaacgacaatttggattatgatataaaagccgaggaagataattccggcggcagataaaatcataggattttgaaatacaaaagaaaaacagaggttttttaatggagagacatatagaagttgaaaaaatggatctcgttataaatctgttcggcagttttgacgagaatgttaagataatagagaaggagcttgacgttgctataatcaaccgtggttctgaaattaaaataggcggagaaccggataaggttgaaaaggcagtggctgctgtaaaccagcttttggccgtggcttcccggggagaaacgataggggagcaggaggtccgttatgtcatgggtcagattgacgacggaaaagaagaggaactggctgatttggggaaagacgtaatttgcatcacctctaacggtacccctttaaaggctaaaacattaggtcagaagcagtatgttgagatgataaagaaaaaccctattgtgtttggaatcgggccggcaggaacgggaaaaacctatttggcggtagcaatggcggtgtcggcttttaaaaataaggaagtcaacagaatagttttaacgagaccggcaattgaagccggggagagcctgggatttttgcccggggatatgcaggaaaaggttgacccttatctgagaccgctgtatgacgctttgggggaaatgttcggctttgaagcgtttcataagatattggagagagggcagatagaggtcgctccgctggcgtatatgagaggaagaactcttgacgacgcttttataatcctggacgaggcgcagaataccactcaggagcagatgaagatgtttctgacccgtatgggatttgcttctaaaatagtggttacgggcgacgttactcaggttgacctgccgagggataaaaagtcggggctgagagacgcggaaatagtcctcaaaaatattgagggcatagagtttatgtatttgtctgaaaaggatgtcgttcgtcatccgctggtgcagaagatagttaaggcttatgagaaaaagactatggagcgcgagagggttttaaggcagaaacgtgacagaaacagcagggagagacgcgcgcagaattaatatttgatatacaaaagaggcattgcttatgaaagttgcaattttaaatcaacaggataagataaaggttggaaaaccgctgaaagatttgataaaaaggtcggcggaagcgtcgcttaaattttttgatttgggaaccgatgttgagataagcgttatgctgacagacaacgatggtatacgcgaccttaataaacttcacaggaatattgacagggcgaccgacgtcctgtctttcccaatgtttgagtataatgaagccggggagataaacgaggattatgctgagctgaatgaaatgggagaaatatgtttgggcgatattgttatttctctggagcgcgcagaagaacaggctgaggagtatggtcattcgtttgagagagaggtcgggttcctgactgttcactctatgcttcatttgctggggtttgaccatatgacagaggaagaagagaaagaaatgtttgactatcagagagagatacttgagcagatggagctgacgagatgaaaaaactgataaagagtttcggttacgctttttcgggactatgggcgtgtataatatacgagaggaatttccgtatacatatctctgccgctttggcggtgtttgtttttgcgtggctgtatggcgttgacaatgttcatcttgcggttttggtgctgacggttgctctcgtgtttataaccgaggcggtcaacacctcgattgagaaggcggtggattttttgtcacctgaaagatcggaaactgccaaaatcgccaaagacgcggcggcgggagctgttctgctttcggcaatagcggcggtggctgttgcggtgatgtcatttaacgatcttgacaggctgagctggacttttctgcagctgtttactatgcctaatttaatttttactgtggcttatataattttgagtatcgtatttatattttgtatagtacctaagactaatattgaaaggaaataattatgaaatcaggatttgtcgctataaccggaaggccgaacgcagggaagtctactctgcttaatcggataataggagaaaaggtggctatagtttctaaaaagccgcagacaacgagaacaaaaattttaggggtgcacactgaggaggactgtcagattgtcctgattgatacccctggtatacacaaaccccacaacaagctgggtcagcgcatggagaagtatatatactcagcgacccaggatattgacgtgctggtctatgttgtggactgcaacatttccgacagggaacttgagcttgaaaaggagtcgcttgacgggctgaaaaaatcaaatgtacctgttgttttggctgtcaacaagattgactctgttcaaaagctgagtttgctgccgctgatggacaagctgaagtcgatatacaattttgatgagattattcccatatcagcgcaaaagggtgaaaatgtggacaggctgttaaaaatccttgagggatatttgagcgagggcccaaaattttttccggatgatattataactgatcagccagagcggcagatagttgctgagtttatccgtgaaaaggctttaaggctgcttaataaagaggtgccgcacggtattgctgttgaaatagaaaaaatgagccaaagagagaacgggacttatgatattatggcggcaatatattgtgaaaagcagagccataaggggataataatcggaaaaggcggagagaagctgaaagatattggaagacagtcacgccaggatattgagagatttttaggtgaaaaggtttatctcgagctttgggtaaaggtgaaagagaactggagaaatcttgataatttcatcaccgaaatgggattcgataaaaaataacagtaaagacttttatgtgattttgtgaggatataaatatgtcgttatttaaagttgcgcttctgcagatgacgtctgcagggacaaaggaagaaaatctgcgcaagggcgtggagttttgcagaaatgcgaaggctatgggtgcggatttggctttgtttcctgagatgtggaacaacggctacagtctttcctatgacatggaggttatggaaaggaattcagaggatcaggacggcttgtttgtcaatacttttaaagagctggctgccgagctggaaatggcaatagctgtgacatatttggaaaaatacaagcctctgccaagaaataccgtgacggtttttgacaggcacggcagaaatgtgcttacatatgcgaaagtgcatacctgcgattttgatatagagaaaaatttaactcccggcgatgagttttatgtgacagaactagatactgaaaacgggaaagtaaatattggggctatgatttgctacgacagagagttcccggaaagcgccaggattctgatgctgaaaggtgcggaaatcattcttgttcccaacgcctgcccgatggagataaaccgtttgtcacagctcagggcaagggcgtttgaaaatatggtgggaatcgccacagcaaattatgcttatggccagcccgactgcaacggtcattcttcagctttcgacggcatggcttacggagagatacgccccggcacagttgaagccagagacacgcttatagttgaggccggagaggctgaggggatatatttggcgcagtttcctatggataagatacgtgaatatagaaagaatgaagttcatggaaacacctacagacgtccgcttaaatataaagaactgatttctgagaagatagacgagccgtttataagagatgattacagaaagtgaaaacagaactctgatttatagctatgaaatacgagcgttatgattacagcgaatgaataaggagggctttgatgcctaatattgatgtttgcggtttggtaaccagggaggtcaaatatggtgaaaacagcaggatactaactgttttggctaaggatataggcaaggtttcggttcttgccagccgtgcgagaaccaaccgttcaggtttgctgactgcaacacagctttttgcttattctaatttcacactgtttaaagggcgtgagaacagccttatgaagatgaatgagggagaagttatagagtcattttctgagataagaaattctcttgacaatatggcatacgcgtcatacttttgtgacatagccaatcatatatgcaccgacggcacagaggagaacgaactgttgggcctattgctcagagtattaaagagactgtctgtaaaggaagaaaatacggcggagtcgctcaaagccgagtgcgtttttcttttccgtgcgctttcaatagcggggtttgcgccaaactgcgacggctgcgcttcctgcggcaaaaatgaaaatataaaattttttgatattcagaacggtatttttttatgcggaaactgttccgcaaaacccaggcagaacactgtcgagattaccagcgcgatgtataacacgatagattatatagtaagctctgagattaaaagggtgttttcgtttagtttaggggagaagagtttgagatatttggcaggagtgggagaagcctgtgtaaggaatcagctggaatacgattttaaaactttaaaatatttaaataatgtgagagatctatagggatttaaaacaatattattttatataattattgctgtgtatacagcaataaaatttatatctaagtgagtatacatattattaatttgtatctaagtgaatatacatattattaatttatatctaagtgaatatacatattattaatttatatctaagtgaatatacatattattaatttatatctaatgatatgtatatgaaccgagcttttcaagcgcggctcattttttaattctttattacatatacccgtgcctgcgcgcctaacgcggcgcttaccagcgccctaccgatgcttgcctgaaagtgtgattatataataaaataaaaataagctggtgttttggcgaacatcggtaggtgtgaccacacttttaaaaaaagtgtgtgtaatacatactaacttgttttgccattacctgcaatgtcattagtatgtatactcaatgcaaactgtgtttgccgcgttaggtgagcaaccaaatcacgcgaagcgagaacatacatataacatttgttataatccattttataaaatttattccgcgactgcgcgccttacgcggcgcttaccagagtcattgagtattcataataatatttgcgtattcatattattgacattgaaggtttgataaaacaagtcacaatgcctcacactcaccatacaggtggggtcacagacattgtaggttatggcaaaataaaatcatatgtattacacacacttttttaaagtgtggtcacagccctgtcgatgcttgcctgaaagtgtgattataaaataaaattaaaatataaataagctggtgttttggcgaacatcggtagggcagacggcgtctgccgcgtaaggtgagcaaccaaatcacgcaaagcgtgaacatacgtataacatttgttataatcctttttataaaatctataccgcggctgtgcgccttacgcggcgcctatcagcgccctaccgatgcttgcctgaaaatgtgattatataataaaataaaaataagctggtgttttggcgaacatcggtagggcaaactgtgtttgccgcattaggtgagcaactaaatcacgcgaagcgtgaacatacgtataacatttgttataatccattttataaaatttattccgcgactgcgcgcctaacgcggcgcttaccagcgccctaccgatgcttgcctgaaagtgtgattatataataaaataaaaataagctggtgttttggcgaacatcggtaggtgtgaccacacttttttaaagtgtgtgtaatacatactaacttgttttgccattacatgcaatgtcattagtatgtatactcaatgcagacgttgtctgccgcgttaggtgagctgtcatctcacgcgaagcgtgaacatatatataacatttgttataatcctttttataaaatctattccgtgactgcgcgccttacgcggcgcctatcagcgcccttccgatgcttgctgaaacataattttaatttatgcaaagctatttataaaatacaaaactcatatttataaagaaatttattctttatttatatgagttttatgttttattttattttaataatatgattaaattatatattgttttttagcttttgactggaagctctatttttttgttttcttcagattctttatagagcacaaatttgtttcctataacttgaaccacgtctgcggaggcggcttccgccagctcccccgccgcttcccgggcggttagcattgagttttcaagaacgtgaacttttattagctctctggcttccaatgcgtccagaataagtgcgaccatgttatcgtttataccgtcttttccaacttggtatagcgccggttctctgttggcaaggcctctgagataagcgcgctgtttactgtttatcatattgctctccttttgtttagttagttttcagcagttcggcagtcttgctgtcaggctgtctgccggtctgacgtatcagtgcttccgaaactgcggcgtatacttttttggctgtgatgtccggttcggagtttttgaagcattcaatgtgtctctttactgtctcaaaatcgccccgctctataggacctgtcaaagcgtttataggtccgttttttagaatattgttcatattatttttcagcagaggtcttatggcggcgaaggcgtcgtcatatgaaaaaccgcattcctctaaaagttcgcaggaaagttcagcgagagccacaacaaagttgcttgcaaaaacagcggcggcatggtatttgcttttgttttcggcgctgagaatttgaaagcggctgccgcacttttttaaaacttccgccggaacgccgcttccctcaacggtgaaaaatgcttctctaaaatctttatagcttgtaaatttatcattcaccgcaagcagcatatgtatacttgcggtttcagcttttaatattttgagttcggacaaaactgtactggaaagcgcgccggaggtgtgacagaaaattttattgcttatatcaatatcatattttctgcattcactggctatattatggcttacatcagcaatagcgccgtcgttcaccgttataaatattaaatccgaatctgtgattatctctttcagtccggtataagcagaggcagagccgccgataaattctgcggattcctcagccgagctttgtgttcttgaataaaagccggagacggaaagcccgttttcggacagatatttgccgagtgaagagccgacccgtcctgctcctataaatcctattctcatatttttctccattttatttagctgaatattcgaaactgtcaaacgagggataaatagtgctttcagttccgctgtaggcatatagaccaatcatagcgccagtaaagcgtttgcccttgctgattgcctgactgcaaaggtaatacaggttctcggcagcatagacctctgtaaaagttttgccgtcatggctgtagctgaatgtgcgttttaatccttcggttgaaattttcaggtacaggctgtcggttacctctgttatatcaacggtgcaggtatatttctcgtcctcgtctattttttcaaacagttttaacgcgtatccgtcaccgttcttatatattccatatgtgaagtatgtattctcatcataatatccggtcattccataattttgttcgctgtccagcttgattcccaaatccagcttgcatacagcgtcaaaattaaagtccggctgtcttctgaccgtaatgtttttggcagacgttgaacttagcggacagcgtgagccttttattatcagcttactgtccttaacagtgattccgtctgcttccggcgttcttggaaatatccagtcaggttttaatctgtctccgtcaaaatcgtcaaatcctgatttttcttctgtatccatagccgggagatttggttttttctgcagatagctggggccgttcaagctgttaacgataggccagccgtcggcggtccaggtcaccgggtcgagacatgtctctctgcccaaaattccatactcgccgtcgagcagtctgttgcacagatataccatataccattcgccgttttgagtctcaactggcttgccgtgtccgcagcatgtgattggagcgtcataatccctctgggtcataatcggattgtatgggcagggttcataaacgccttttaaggttttgctccttgaaactgtcacctggtgcataagcccggtgccgccctccgcttcaaagaggtagtaatatccgtctttatataatagatgcggtccttcgggagcgcgtttattggttccgtagtataagagctccgcgtctgaaatcttttttgtgcagtcgtctcccagttccagtattctggcacccctgttcaggagcatataccgtttgttgtccttgtcggtaaatatagacgggtcgattccgtcctcttcaataaatgccggttcggagtacggtccctcaggtttttcggatgaaaccacgatttggcggcgctttacatctacgtcgtcattatatctgagggtggctgtgatataaaactttccgttaaagtacgaaatatccggtgcccagtagcccctgccgccttccaaatcatctatgtgcgcccagtcgggatttgtgattgcatggcctataacttcccagtgcacaaggtctgtggaatgagagataggtatgcaggggaagaagataaacgaggagttaaccatataataatcacttcccacacgaacgatagacgggtcagcgaaaaatccgcgtcttatcggattgtgatacatatcctcatatttggctccggtgacctcttcaaaataggcctctatctcagcaagtccgttttcgtgagcaagctgatacggggtcacaaggtttttgtcagcgtcgcagggagacattccaacacgctcaaccaaatacttcacacattcaagactgcctgacataaccgcttcgtgcagacaggttctatggttcttgtctccgatattaaagctggcgaaagagtattcaataagaaaacgcagcatttcaaaatctccggttcgggctatataaaaagacataggaacgccgttttcgtcttcttcatttattctctttggattttcgtttaatatttctttgattttattcaggtcatggttctttataagttctatcatttcactcataacttttactgcccctttcaatatacagatatttcataaatacatatattctaacagtgtttaagaataaatgcaacatttattttaagtatatattacaatatatacgttccaaaatcaaagtgacaaattgagtgcatttaacacatcgcttgataaatatccgccaaacatacggcgtggataattattaatccaactttgaatgtattttatttttttatgtactatattatataaggtaaaatcaatcagcttgtttgcactcttgttgttactctttcatatatactgtgcggaaacgcataatataaacttgtgagttccccgtctattttgcagcttaacgtatatgtgtttaaaatgaaactgatttttactagatagaaaaacagacacgtgataaattatcagcttaagaatcgtttctgcggatagtgaaacatagcgtttattcagtatttttcaggtctgcttgttgacaaattttatcgtttatgatagtattacaaaataattgattagaatttttgtccgtattaaagcgggcttgtactttaggataaaaccagcagaattaggaggaaaaaccatggattttgtaatgagttgtttgagcgtcggcgaaaatggcaatctttctattggaggatgcgacgttgccgcgctagctgaggaatatggaaccccggcgtatataatggacgaggatcagattcgtgaaaactgccgtgtttacaacagggcgatgcaggagtattacggcggtaacggtatcgttctttatgccagcaaggctctttcatgcaagtatatttacagaatgatgaaagaggagaacatgggtatagacgttgtttccggcggtgagatgtacactgctttaaaagccggattcccggctgaaaggatatactttcacggcaacaacaagactgacgacgagcttaaaatggcgcttgagaacggtgttggaagaatagttgttgacaatgtttttgagcttgaaagccttaacagactgtcaggggaaatgggaaagaccgcggatatattgtttagaataaaacccggtatagacgcgcatacccacagctttatcagaacagggcagatagattcaaagtttggggtttcgcttgaaaacggcgaggctgaaaatataataaagatggctgacgatatggaaaacttgaatgttgtcggagttcactgccatataggctctcagatttttgagcttgagccgtttgaactggcggctgagaagatgatgacgtttatagccgaccttaaagacaaatatgatatttctataaaagagctgaatttgggcggcggttacggcataaagtatactgagggcgacactcctattgattatgacaagtatatacaggcggtgtctaaggttgtccgccgtatctctgaggagaggggaatacctctgccttatatagttatggaacccggacgttctataaccgctgaaacaggtctcactgtttatagggtaggcgctgtgaaagagataccgggggtcagaacatacatttcggttgacggaggtatgggagacaatccgagatatatactttatcagagcgagtatgaagctgtcagagtaaataatcctttagctgaaaaaacagttacggcaacattggccggaaagtgctgtgaatccggagacattttgattaaggacgctaagctgcctgaaatcaaagttggtgatttggtagcggttttggctactggcgcatataattattcaatggccagcaattataatagaataccgcgtctgcctatagtaatggtgagcggcggaaaatcaagattagccgtaaagcgcgaatcatatgacgatttgattgctaacgacctgtaaaccggaggaatttttatgttatttagtgttttgggtgacgcttcgatgaactttggacagaagctgctcaccatattagttttggtgttttgtgtgcttctgtcgttgtctgttcatgagcttggacatggcttggcggcttacgctatgggtgactataccgcgaaaagcagcggcaggctcagtcttaacccactgcatcatcttgaccctatcggcgctatctgtctttttctgtttggattcggctgggcaaaacctgtgccggttaatccatacaactttaaaaatcaaaagggcggtatggtgctgacgtcgctggccggtccgtttaccaattttattttggcgtttatcgctcaaatcggcgttgctgcgcttgggagcataacattcaggtctgcgaatattggttatgatatagcttcggttttctatatgatttgcagctatatggttattatgaaccttggtctcgcaatttttaacctgataccggtgcctccgcttgacggctcaaaggtgcttagctctgtgctgcctactgatttgtattttaaatatatgcagtatgaacagtttggttttatactgcttatcctgctgataaacctgccgtttttcagcagattgctgaatatgtgcgtgtatgggataatgggattttattctcagattatctcactgttcattcattagggataaattttagcggggattagtgattttgataaatggaacaattaaactttaaggttttggactttgagggccctctggatttgctgctggcccttataaaaaagaataaggtcagcatttatgatatacctatctccacaattgtggagcagtattttggcgttatgcgtcaaatgaaggaatataacctggacatttccagtgagtttttggtgcttgcggctactctgctgcaaataaagtcaagaatgctgctgccgaaacctgttgaggaagacgagactgacccgagagaagagcttgtgaaaaggctggaagaataccggcgcgttaaggcggccgcggagtatcttgaagccagaaagcatattggggagtcgatgtttttcaaagagcctgacaaaatcgagaaacctccggctgagtggaattattccaagctgacccctgaaaacctgcttttagcttataaacaggcttatcagaagatggagcggaaactgccgccgccgaaatattcgtttgacggaatagtggggcgtgaaaaagtttctgtgcgctcaaaggttaagcaaatttggggcaggctgttcggaaaaacgaaggtctttttcaaagaactttttaaaggaacaaaatccaggcctgaggccgttgcttcctttttggcggttcttgaaatgataaagctaaatcaagttaaagtcgagtatgatgagagcggagacatatcaaatcctatcgtaaccaaaagcggagacggggaacttgatttaagcgcgattgaggactaggagaagataaagatggaaatcagggaaattcaggccattgtggaaagcctgctgtttgcggcaggggaagcggtggagctggaaaagattgccgatatagttgatgttgataaaaaatctttgagagaaataataaaaaaaatgattgatacctataattatgaaaagcgcggtatccatataataaagcttgaggattcatacaggatgtgcaccagaggcgaatataaggattatgtttcaatgcttatgaagccgggcagaaagctgcagctttctaatgccgctatagaggttttggcgattgtcgcgtataaacagcctgttacaagggctacaatagagcatataagaggcgtaaactgtgactatatagtgaaccggcttatagagagaagatttatagccgagatgggacggatgaaagatgctccgggcagaccgatactattcggcaccactaaggagtttttgcagacatttggtatagagagtataagcgaccttcccgaatttgagtctttggccgtgcctgaggatactgacatggagcagatgacgattgatgagaagcaggaacagctggagtttaacagcgccgtttctgaggaagccgcggtaactgaaacatccgataaaaatattgaaaatgcaggggagtaatttttattcggcaagggatataagtctttttgtttgaaacgcatgagttttattagaaaactgtttagacgtgagacgatgtataatactgagaggtggtataatgcacgtagtttggataatacttggtataatagtatttatcatttgttttgtgctatggtcaaccgttacgctggatatagcctctaacggtaaaaaaactattattaccgccagtatgtacaggtttcttaaatatgaaatagttttgccgaagccatccgaattagacgaggacaagcaggagcctgacgcggagcagaaagctgataccacagaaaatgaaactatgggaaatgaattctctgaaaaagaatttcacggtaatagaagaaatattgcggagcagaaagccgggacggctgatagtgcagacaatgattcaataggaaaagaatttgatgaaaaagaatttcatagtaacagagcagattttaaagagcagaaagctgataaggccggcggttcagaaaataatgaggcagataataattcctctgaaacagataaaggattttatgaaaataaaaaaagttttatgggaacctttaaagaggatttaaaaagtatttgggacagtgaaaaccacaatcttgatattccgcggatatatgaagtgattttaaaatatactaatataataaaaagcggcaaatacgggcttaataagttttttggatatatgaagcataagattaggattaacagactggatttgtatattcgttttgggacaggcgagcctgataaaaccggtatgacatacggtgcgctgtatggtttggcaggaagcataagtcctctgctgaaaaagtttttcaagatgaaagacagcccaagactgtttcttgacccaaactatgtgacccggtgctttgaatttgaagtgggaagtataattaaaacaagggcggctcatattatcaatgccgcagttatagctcttgtgtcttatttaataaaaaagagaaaaggaagtgttgagaatgtcagaactatcggacaagcatccaattgaggggttgatgtcttctgcaatgcagggactcaaagaaatgattgacgttaacacaatcgtgggcagccctattacgacttcggacggaactgttataatgcctatttcaaaggtggctttgggttttggagttggaggctctgagtttcctaaaaacaaaaaactgctcagcggtgaacaggaagaggtcaataacctgttcggaggcggaacaggcggcggactgtctttgacccctgtgggatttttggttgttggcaacggcactataagaatggttccggtcagcgaggagaacagtatctatgacaggattatagacgcggttccgacggctatagacaagattagcgagataatttcttcagccaaaggaaagagcaatgtggtggttgaccatgaaccagcggagcctgacagttatgttccggatgatgaaagcgatgattatgttgcaggttcgtttgaaggctaggcggtctgcgttttagacttaatgattaggagtaatgttatttaatgctgattagagagaaagttctgccgtttatgctgagtatctttatttttgcggcttgtttcgtgggtacagagcctgcatatgcggcggataatcaagttataaatattgtgttggacccgggtcacggcggcactgattatggtgcgacttcggtcggaggcctggagtttcaggaaaagaatatcacgtttaagcttgcccagtatatacagctggaattgagaaaatacagcggcgtatctgtgaatatgaccagatatgccgactaccatatgaccaacgctgaaagagcggattatgctcagagagttggggctgatgtggtagtaagcctgcactttaactcgtcttcggacaggtctgtgcatggcgccgccgtctgcgcgtcagggctttgggaatatactaagcccgatttgggatataagatattgtcggagctggcggggcttggtatagatacgtcagccggggtttatactcaggcttcaaccacaggaaacatgtggtgggacggtgagcggttggctgacttttcaggcgttatgcgtgagtgcgcctaccgtgatataccggcgatttctgtcgagcactgttacttgagctgttatgacgagcttatttattataataacgacattgcgctgagaaagctggcggccgcagatgtgaggggaattgctgaggaatatggactgcagcttcaaaaatctgagggaaatgttgacagaacatacgataacgcatatatcaacggatatgaggacggcacattcagaccatcgggaacaataacccgtgcggaagccgctacaatgctggcaaaactcagcgatagttttgacccggatcagcagtacagcactacgctcagcgacgtgccggcgtgggcgtggtattataagtatattgcgtttttgaattcagttgggttcataaccggagacgtgtatggaacatacaggcctgacgacaatatgtcaagggccgagttcgctattcttgcctgcaggtatttggggcttcagccgggcggagaaagcggattcagcgattgcaaaggacatatggcggacggctacattgccgctcttagaaataatggttacgtcggcggtgatgaaaacggcgagttccatccaaatgacgacatgatacgttcttcggttgttatgatgatgaataggatactcggaagattcccggtttgcagcactcagaaagaaaatccgtttacggatatagctcccggattctgggcttatgacaatattttggaagcggcagtatcacacgaggttcgataattaaacataaataatattataaatgcggacaatatgtttgtccgtatttatttttggtttaaggctcgtattttgtcaaagtttttgggtcaatagttgaggaaactttgaatatattgatttatatggataatcaattcttatttttataggtaatgtttgtatgattgattgtttttacgtcatttgaaaacggagatgataaattgggtattaaaaaacataatgcggcaattaaatatataggggtctttttgttaacggcctctgttttgcttactaatttttatgccgtcagagctgaggatacggggacggtggggacatcagctcaggccgccgccgttatagaacagaactcaggcagagtgctgtataataaaaatgccgaccaggagctgcctatggcgagcactactaagataatgaccgccgcagtggcgctgaaatacggcaatctttcggatgttatagaggttagcgcgactgcagcaggagttgaggggtcaagcatgtatctggagtgcggtgagaagataactttagaaaatttgctgtatggactgatgcttctctcgggcaacgatgcggccgtggcaatagcggaacatattggaggcggagtggacggatttgtcgagctgatgaacaaaactgcctcagagcttggtttatcacatacccattttgacaaccctaacggtctgccgtcagatactcattacaccacggctttagagctggcgaaaataaccaggtatgctatgagtatgccggagtttgttcagatagtatcgacaaagagcaagacgataccctgggagggcaagggttatgacaggagcatgacaaatcataataagcttttgggaagtttagagggctgtataggcgttaagaccggatttacaaaggcggcaggcaggtgtttggtttctgccgtaaaccgaaacgatatgacattgatatgcgtgactttaaatgacccgaatgactgggctgaccacgcatcgcttcaaaacagcatgtttcagaaatacagccagaatgttttgacctcaactgaaatgataatagataagatttctgtagccggcggaatgctgggatatgctggggtcagcccgaataagacgtatacatttccggtttgtgaaaacgacagcgtaagcgttgacacaaatgttgacagcgagaatatgaagttcccaataaaaagcggcgacgtggtcggtacgggcacggtgacggtaaacggcgaaaactacgggaattttgaactgctggcaaacagcgatatagatttggctcgaccgtctaaaggcagtttttggaatgatatgaaaaatgatattgtatatgtttttcagtattggctgagcatgttccggtgagatatgaaaagttagataatttatataagatgagaaatataaaattatataacttatataaaatgatatgaaatataaaaaggaaagccgacagaaaattaagggttttgctttgcaaacctcggaagtgtttgcccctgcctgaagggtggtgtaatacaaagggatttgtattacatctactttaaaaaagtgtagtcacagtcctgccgaagcttgcgaaaccatatttttatatctttattatagaataattatatatttataatctaatatgcggtgtatatagtgaacatcggtagggtgtgcgcaagcacaccacgttaggtgagctgccatctcacgcggagcgtgaatatatatgaaacgatttgaaagtatcatttttatataaacttttccatgactgcacgcctaacgcggcaaactacgtttgcacatcacaactaagtgatttattgacattgaaggtttatcaatacaaagagatttgtatcacatacactttaaaaaagtgtagtcacagccctaccgaagcttgcaaaaccacatttttatatttatattatagaataattatatatttataatctaatatgcggagttcttagtgaacatcggtagggtgtgcttacgcacaccgcgttaggtgagccatcatctcacgcgaagcgtgaatatatatgaaacgatttgaaattattctttttatataaatttttccatgactgcgcgcctaacgcggcagatttcatctgcattgagtattcataataatatttgcgtattcatattattgacattgaaggtaaatcaaaacaagtcactttatatcacacccaccatactggtggggtcacagacattgaaggtttatcaatacaaagagatttgtatcacatacactttaaaaaagtgtagtcacagccctaccgaagcttgcaaaaccacatttttatatttatatttagaataattatatatttataatctaatatgcggagttcttagtgaacatcggcaggacgcgcttgcgcgtctcgttaggtgagctgtcatctcacgcgaagcgtgaatatatatgaaacgatttgaaagtatcctttttatataaacttggccgtgactgcgcgcctaacgcggcaaacgttgtttgcattgcatattcatattattgtttgcgtattcatattattgacattgaaggtaaatcaaaacaagtcactttatataacacccaccatactggtggggtcacagacattgaaggtttatcaatacaaaggaatttgtattacatacactttaaaaaagtgtagtcacagccctaccgaagcttgcaaaaccacattttatatattttttatttttaatatataacctttcttttatgtttagctttattgaagactttctacagaattatacgagacatataaaattatatgatgtatataaatcacatgagacttacaaatcatataatatatacaagctatataatttataaaaaattagacgagtaatataagatatatcaagtcaaataagatataaaataagcagaaaattttgaagtatttgtgcttcaaaattttctgccctttgtttttatttgcttattattgcggatttgcctgaggctttcgcttggtaaagcctgttatcggcaagattaaataaatcataaaactcatcggattctatttcgtcggaaccggcgcatccaacactgacagtcagttttatattattgccgttttcgtcggttgaatagctgcatgccggtgtaaaaatatcaaaaatcattttttggaattcgtcataattttcactttcgtatactataatgaactcgtctccgccatatcttgcgataaatgtgtttttataatctttaagtgaattattccaggattcagctaaataatttaaaatctgatccccggttctgtgaccataattgtcattgacttctttaaagttatcaatgtctaaaatagccaaacagactgaacggtttaactttttcattctgctgtagctgtttataaaatgctcttcaacatatctgcggttgtagacatttgtcagcggatcggtgataagctgtttgtttttatgttttaggtcgagtatggtgttaaacatttcgtcttcgctgaatataaagttccggctgatatccttaaccatttcaagtgcaaaactgcggccgtcaacattgatatatttggatattatataatataaattcttatttatattctcaaatttaacataaaaatccttgtctatcaaggttcttgcagaaatacagttggagcaccggctttcatttgaccagacgttaaaacaaaatccgtcttttccggtcaggccggccgatgataattcaggcatcagtttatccacagtatccgattctttcagtatttcctcagagataactttgcagataatagggtcgacaactctgactatgtcgaaggtatttcggaggatttttatttcacttattaattcgttataggtgtaattgtgtttcattataattctcctgctgttccggacaatatttgggattatccgcccaatctattatccaatttgttttatattataacatgttgtattttgtttgtaaataacagtcggttaaaatcatatatacaaacaagtcagacatatttattgattttctatcattatttaatattttaattttgagcttaaaaaatttcagtcattaaattttgtttgatactatgcgtgtagttttgcagtctgaattgaaccaaaaagcaacaaagccggctaaatatatgaactattttattctctgaattaaacgttgttttcatatggaaaaatctgccgaactgttttatatttttattacagccatttatttatgaaattaaataattcagtatttttcgctgaatgcagccgtatcagctttagatgaaactttctgtttgcttgaacattctttcgtgcacggctgcatttctttgcgtatcgaatgtggttaagcaacaataagttttgtttagtacctatttttatccatatacgtgtggaaatttttagtatgttttaaattatccacatattcgcagtatatcaagattatgattctgattgaatgtttctttttgtaaatttagccgccaatcagacgtacagattagcggctattagtaatttaacaatcttgtgatgaaaacagtccgaacttatttaactattttatatgttccgtatataacttttgaagcttccgctctcgtggcagaaccgcggggtttgaaacttccgtcctcatatccgttcataacaccgagacctacaagttctgcaaccgcgtctttagcatatgcggcaatatctgaattgtcagtgaattccagtatcacgccgtcgccgctcttgtttattgctctgtataaaatagtagccatgtcttgtctcatgataacttctccgataccgaagtattcatctgactgaccttgtacatatccggcgttgactgctgctgtaacatatggagcataccatttagtttcgtccacatcattaaaatgtgaggttgtgtctgtggcgtcaaggccaaacatctgaactaccattttgcagaactgctctcttgtgacgtttccgcttgggtcaaacttattgtcgcccataccgtttactataccggcatttgtaagaccgataatagattctaaagcccagtcatatccgtccaaatcagtatatggattttcgtctgcaaagttaggagctttggtgggatccggttcagtcggtgcggatgatggataaacggttccggaaccgttagtatctccgcctgtattgccaccggtacttccgccctgatttttgttcgggttaacagttttataagctgttactgtatcttcacctaaataatatgagatgtcattatatttgtaatagcatttaacgtgaacaacgtctccggttttatacatttttgtggtagacggcaaacttacggaaactgactcgtctccggctttaaaagccttttcactgctgttttggataacttcgccttttgagttgtatgcgtaaacctgaacagttgcgtcctggtctattatagcctttcttcttttgacggaaacagaccagctgtatcctatgtttataccgttagtgattgagaatatgggcagattgtcgcttacaacgtttccgtcctcaattttattgataattttttctattgaagacagcatatattctttatatgtgccgctgtaattcttattcacatcatcatataaactttgcgctatagtcttcagcgatgacagatatgttttatatagagtatgcaggctgaaactgttggcttttgagtattgaacttcaagagaagctatttttgtgttataattctcagccgttttgtcctcaagagttttcagcgctgtttcaatatatttattataatctgttagctttgataccacttcattgtattcttcagttgcttttgcggctcttttaagtgcgcttggaacagaggttgaaagattgtcaaatgtggtctttaagtattcatagtttaaagccgagctgtcgtcagttattccgtcataacattccggcatctgcataatccctgaaacttcctgcatagctttagcggctttttgcagggtataaaagtcagtaattgatttattgctgattgagagagcggtatcgattctttttttgcttgtttccatcatagaatcataaagctcaacagcggtgtctattcgtgcagaatagtagcttgagatatcatataaatcgtccttttcttcatccttataaaatgtcagcgctgatatttcaggcagagccattagagcatcataggatgactgttccttttcagtaaggtcaggcatatttgtgccttcaaccactgacagcgttgggttaataataagctcggagccgtcttttaaagtcgctgtaaatttgtcaatagacatgttatgcgaggtgattttattctttgatgtaacagacgcgtttgacaggacaaccgcgccgctcagggcggttgagccgttcttccaaacgtaagttatagttttatcgtccgttatggattttgaagtttcaccgttaccggcaaagctttcaccaaaggatacggagttaatttccgcattatcaaaagtggctgtaagctcaaagcctaaaatttcaggcagtgatgacgcagttttgaaaactaccttatatacgtcgtcttcatcggttgtataaactgttgcggtgactttcatatccatttcctgagcgccgggcgtggctgtgggttcaggagataccgtaggctcctcgggttcagcggtggctgacggttcaggtgaagccgtagcttcagtagtttcatcagtgagcacagtgtctgttgctgtgattgtttcattattattctctccggcagcaaagactgcaggagctgaaactgcggtagttaaaacagcggcggaaacaagaccgcagactagattgttcagttttttattcttcataactaacctcctgatatacaagaaaaattgtgtaaaacattaagcatagaattaattataacattcaaatatttaatatcaattaatcagcaattacaatagtgttacattcgacattatacgcatgttaatatatggtaaagccaaaacaaaaaatgcggaaactacttgatttataatattccaaatgttataatgtcaaaagctatatattgaaaggagcgatttttgtggctaaagagctgtcaaaaacctatgaccctaaggcggttgaggaaaaagtatatcaggaatggatagacggcgggtattttcatgcggaggttgatgaaacgaaaaaaccgtttactgtcgtcattccgccgcctaacgtgacaggtcagcttcatatgggacatgcgctggatgaaacttttcaggatattataatcagaacaaagagaatgcagggatataatgcgctctggattccggggactgaccatgcaggtattgctactcagataaaagttgaagaggatatgagagtcaatgaaaacgggctcaccagatatgatttaggcagagaaaagtttttggaaagagtttgggcttggaagaagaagtttggaaacagaattatagaccaattgaaaaagataggctgttcctgtgattgggacagggaacgcttcacaatggacgaggggtgcagcaaggcggtcagagaagtttttgttaacttatacgaaaaaggccttatttatcagggtacaaggataatcaactggtgcccgtcatgcaagaccgccctgtccgacgcagaggttgaatattcggagcaggaaggccatttttggcatattaaatatccgataaaggacagtgacggctatgttgagatagccaccacaagacctgaaacgcttctcggagatactgcggttgccgtaaaccctgatgatgaaagatataaggatttggtgggcaagatgctgattcttccgctggttggaagagagataccggttattgctgacgaatacgttgataaggagtttggtaccggctgtgttaaaataacgccggctcatgacccgaacgattttgaagttggaaagagacatggtcttgaggaaatcaaagtcttaaacgatgacgcaactatcaatcaatacggcggcaaataccagggtatggacaggtatgaagcaagaaaagccatagttgaagatttggacagacagggacttttggttaaggttgagccgcatgtccacaatgtggggggctgttaccgctgcggcacaactgttgaacctatcacctcaaagcaatggtttgttaaaatgaagcctttggctgagccggcggcaaaagctgttgagaacggcgagacaaagtttatccccgaaaggtttactaagacttatatgcactggatggaaaacgttcatgactggtgtatttcacgtcagctttggtggggacatagaatcccggcgttttattgccaggactgcggtgagacaattgtttctaaagaggacattgaggtctgccctaagtgcggcggaaaagttaagcaggacaacgatgtgcttgacacctggttcagcagcgctttgtggccgttttcaaccctgggctggccggatgatactgaggaactgaaatatttctaccctacctcggttttggtaacgggttatgatattatatttttctgggttgcgagaatgattttctcaggaatagagcatatgggtcaggttccttttaaagacgtgtatatccacggtcttgtgagagattctcagggcagaaagatgtcaaagtcgctgggtaacggtattgaccctctggagataatagacgagtacggcgcagacgctttaagatttactttggctaccggaaactctcctggcaacgatatgagattctatactgaaagagttgaggcaagccgtaattttgccaataagatatggaatgcgtcacgatttgttttgatgaatctttctatagataaatgcgaactgccggacagagataagctggagatttcagacaggtggattctgtcggaatacaatgatttggtaaaggaagttacagataatcttgataagtatgagttagggatagcggtttcaaaactgtatgatttcatttgggataagttctgcgattggtatattgaacttgtaaaaccaagattctttgaagagggcgagagcaatataaccgcccagcaggtgcttgtttatgtactgtctaacacgctgaaacttctgcatccattcatgccgtttataaccgaggagatatggcaggctttgcctcatgagggcaagagcataatgatttccagcttcccggtatataatagcgagtataaagacgaaaacgctgaaaaagaaatgcagatgataatggacgcaataaaaggaatcagaaatatcagaaatgagatgaatgttccgccgtccaagaaagccggaatctttataatcactgaggagccggagatatttgaaaacggtataccgttttttaagaagctggcgtacgcgtctgaagttaatgttataaaagacggcggcagcgttcctgagaacgtcgtgtctgttgtagttcccggagctgagattctgatgccgcttgacgagctggttgaccgtgcaaaagagatagagagacttgaaaaggaaaagaagcatcttgaatcagagataaagcgtgtcgagggcaagctgaacaataagggatttaccgaaaaggcgcctgccgcggtagtggaggaagaacgcctgaaaggtgaaaagtacagcgaaatgttaaagaccgttattgaaagtttggaaaagttaaaataaatattttatgcagtatatgtcggcgcttagggggctaatatggataatgtatcaatgggcggaggtttgaaggcggttgtatattgctctcataccggtcatgccaaaaaatgtgcggaaatgttctcaaatcgtttgggagtgccgtgttatgacattaagaatataaaagggcttggcaggaacagcaatattgtattctttggctggataagggctaacaaaataattggctataaaaaagctaaaggattttttgatatcaagctgatatgcggcgttggtatgtgcaaaggcacggacagcattatacaaagcttgattgagagaaatgatattgataagccgttttattatgttcagggcggagttaatacggaaaggctgagcggagtttataaatggatattgaatatagtccgatttggaattggaaaagccgttagccaaggtgtcagcccggacgaaagtttcgattctaaggctcaggcggagtatgaggataataaggagcttttaaaggatatacaaaataaccgcgaccatataaccgacagtgctgtggaagagctggttaagtattatcaggcgttaaagtaatgttatttatggcggcggggtatatcctgccgccatttttgataaaagattatgctgctgaggcatcaaaaaacgaattgttgggaggcactttggatgaaaaagcaagttaaaacaaacgctatgaggatattggagaaatcgggaataaattttgaggctgtattctatgacagcgatggatttatggatggggtttcggtagctgaaaagctgggtcaggatttaagggacgtatataagacgttagtgacagagagcaaaaatcacgagtattttgtgtttgtcattccggtggcagaagaactggatttaaagaaatgtgcggctgctgtggggcaaaaatcgcttgagatgatacatgttaaggatataacgaaggttaccggctacataaggggcggatgcagtccaatcggtatgaaaaagcagtttaaaacagtgatagacttgacggcagaggagcgggaagagataatattcagcggcggcagactgggagtacagattaaaatggctccaggaaagctggcggagctgataggagccgaatttttagacataacaaaataacaggcggcgaggattggaatgagaagtatgaaaactgatttaaggaatattcccggcgtcgggaaatcaatagagcaggatttaatagatataggtataaattgtgttaatgatttaaagggcagagaccctgaggatttatatctaagagacgcggctgtaaaagggatcaaatccgatccgtgccttctgtatgtgttcaggttggcagtgtattatgctgaaaatgaggagcgggatatggaaaaactcaagtggtggtattggaaagacaaaaaatatccgccggagaaataaggtgatgtattcggcggatatttttgataattctatttgattttttataattctatttaaagtattcacatattccggtataaattgcttctgcaagttttttttgatattcttcatctgtcagattttttaattcttcaggatttgataaaaatccgcattcaaccaacgctgccggaactttagcgtttttcagaatatatatcccggtttcgttctttttggcgacccggttattgttgttgtcaagattatttattaaagacgcttgtataagctctccgagttttttgctgtcctcactgttctgtgaataaaaaacctgagcgccgctgtattttggattttcaaatttgttcatatgtatgcttataaataaatcagcgccggaatcttcaatcagcgataacctatataacaggtcgtcttttttgacatatttgccgctggtgttattgagcagtttaacttcgtcactgtcacgggttaaaaccgcggtgtttccgtcagagttaataacatcgcggagtttcagcgccacagccagatttatgtctttttccagaattccgcttgcggacgcgccgccgtcaacaccgccgtgtcctgcgtcaataacaataacttttccgctcgcttccgcattggtagtaacagcagggtcgtcatttaagccgaaaatcattatacaaatggcggcaatcaccataagcgtacctaatcctattaaaattaaactattctttttaacagcaaaaaacacataaatcacctcagttgattatatgtgcgtctatcctatactagaacgtataaaagcgcctgcgtacaatataaataataaaataagatttatagacagtctttcaggctgggtcacagactttgtcggttagataaaacaagacactttgtatcatacgtgccgaagcttgcaaaaccacatttttatataaattattatagaacaattatatatttattatctaatgcggtgtatatagtgaacatcggtagggcgtgcttgcacgccgcgttaggtgagctgtcatctcacgcgaagcgtgaattacttatggaaggttgttataatcctttttaattgcaaattcatccatgactgcgcgccttacgcggcagatttcatctgccctgccgaagcttacaaaaccacacttttatataaattatcatagaataattatatatttattatctaatatgtggtgtatatagtgaacatcgggagggcgcatttatgcgccgcgttaggtgagctgtcatctcacgcgtagcgtgaattacttatggaaggttgttataatcctttttaattgcaaattcatccatgactgcgcgccttgcgaggcaaactacgtttgcattgagtattcaaattattgacattgtaggtaaatcaaaacaagtgattttgtataacatccaccttttcaggtggagtcacacctaccgaagcttgcgaaaccacatttttatataaattatcatagaacaattatatatttaatttctaatatgtggtgtatatagtgaacatcgggagggcgcatttatgcgccgcgttaggtgagccatcatctcacgcgtagcgtgaattacttatgtaaaattgtcataatcctttttattacaaattttcccatgactgcgcgccttacgaggcagatgaaatctgccctgccgaagcttgcaaaaccacatttttatataaattattatctaatgcggtgtttatggtgaacatcggtaggtgtgaccccacctttggtgggtttgatacaaagcggcttgttttattatagccttcaacgtcaataaattacttagttgtgatgtattgcgtgcttgcacgccgcgttaggtgagctgtcagctcacgcgaagcgtgaatattcacttattgtggtttgtcataatcctttttattacaaactttttcgttaaagaaataaatttgttttatccaggcggctgacagcagttatacgcataaacaaagttataaaatatctaaattaacagaattaaattaaaatcaccgcatatagttaaaatgataaaaatgtaaatttcatgaaaataaaagtattttaataaaacagcgagaaaaaaagagaaaatatcaattattactaatttaatcgaaaataatcggaaatatatgcgttgacttttggtctttcaactagtataataatcgatgttgctgttaagtgcggcacacgaaaagatacgggagcatagctcagctgggagagcatctgccttacaagcagagggtcataggttcgagccctattgttcccaccactatctttttaacatatgggagcatagctcagctgggagagcatctgccttacaagcagagggtcataggttcgagccctattgttcccaccatatgtggtccggtagttcagttggttagaatgccagcctgtcacgctggaggtcgtgggttcgaaccccatccggatcgccattacagcttaagcaaattaagctgttttgcctctgtagctcagtcggtagagcaggggactgaaaatccccgtgtcggtggttcgattccgcccggaggcaccattttttgcgggagtggctcagtggtagagcgtcaccttgccaaggtgaacgtcgcgagttcgaatctcgtcttccgctccaactgataaaagacgcatatttttgcgtcttttatcataattattaaagcaggataaaaattttaaaatgtgtgcataattatagaatacaaaaatataattaaataaggcgccatagccaagtggtaaggcagagctctgcaacagctttattccccagttcaaatctgggtggcgcctccaatattatcggggtaagtttgcttgctccgatttttttatgcaaaaatctattgtctgtgccgccgcttctcattttttacataatctgcggttttgcagaagccctgaaattgttggatgaaatgcaagatatttaagtattgccaatattatcaataatattttgtgctttatcgtgttttcaagattaccgtttttataggcgataatttttattaacttctttatatataattgtttttgtatctgtatatctgaatatctgaatctttacaatcttatcatggtatatcaaacattcaactatatcctagaattatcttaaattttttgttataaatcatattttaaatttactgattttcaaagtttgcgacagatgacatttgattgacatatctgctgtcttaaagttaagtatctgctttattgcgtcagttcatattatgatattgtatttattgataaaatgggtattagtcgtataatctgcggatatatccgtagttatttattgttttaagtcggttagactgcaaaattggacttaaacaacactctcaaacgcgaaggggttatcttagtatacacttctttgtaagcgtgaatttagaaaaaattgacagccgtattaaaatgaagaatagatgtttataaattatatgggggtgttgtaatagatttatgttagcgatatactgcaagtaaatctacggtagccgtgagtgatatatttgtaggactttttaattgtgtttcatttcaatcttatatataaacggctgtttgaagtgttaagcaatttggggatataaaaaattcagattaacgcacacagtttggattgataattttttatttctgatattgtgtatattaattcgcataaatttgtgtgacagggcagaatttgattgagtgaacaagtttgattaaatttatttcaactcaagtatcccgggcagatgcggattgtcttttatacaatatatattattgcaatattattttaatccacatcatcacaaagcttttaaccgtgttattttaggtatgaatttttcagtttacgaacctacacgggtgcggctaaagatagggaattcattggtgatattgccaacaaagcaaaagaactgactaatgttagccagctccggaacgataacaaagggtggtacttgccggcgtctgttttatcaccattataggcaagtggaaacatcaaacgtaaaaaatataaactaaaatacttactttgttctgtataatatttttatattacattaataaaggagatttttatataaatattttaatttacccgctcatgtagggtacggcaaaataaaaaacgcttacgcacctcctgaaagagattttaattcacgcaccattatggtgaacaacaaaaataaatcaaacttgatattataatatattaagctttcaattcacaccccagcaatggtataacaaaaaagccccgatttataggagcatatttatatttcagaattttgatagtagaggccatcatataatctttgcaataatatgccctcttcgttaaggtcgtaattatcatcaaaaccaatttctgttattttatcatctaattcggtcaatagtaaatcaatatcagtatatgactttttcaaatattttttcacaagttctttttgtttctcagtaataatcatcacttaaacttcttccttccggtcgttggtttaacctgtattaacacttgagtatcatgattaacggcaggcgttaacaagtcgtcaataaatatttgactttttccatgcttcaactttctaatatcacctaattttgcaggattctgaagcacgtctaatacatcattacattattacgtttttgttcagccggccatatcaccaataatataaaatgctttgatttatttgttatcttcatactgttacttgcagtaatgccaatcaagtttttatctatttcttttgctaatatttttacatttcaatccacagtcgagattatggtgggtttgactattggtaaaatataccacaggctgtatctgtgtccaatttcaatccacgcaccccgcatgggtgcgacggttggaaaatacaatatcaaaatatatctatgatatttcaatccacgcacccatgcggggtgcgacatattttctgcatatggcgtcaacaatggatttaagatttcaatccacgcacccttgaggggtgcgacaaaaaaggagagatatttatgggaaacatgatcatttcaatccacgcacccttgtggggtgcgactgcaaaaatatataaaaaataacatttgtattcctttaatctagtatattttgctttttaagcaaaatatataatataagattaattattacatacattttttattatatatctttgtttttaatggtgcgaacctcccggtaattttatgcgagcttaccattctcatctatatcattttagcatatttttagagataattttatatttataactttttaattggtttaatttcttaagcttatactaaatatgtttattttttcctgttacttattttatatcacataatgtaatataaagcaatatatttttttaaaatatgttaaaaaataaaaaattgcattaaaatataataaataatatgaagaggaatattataaatacttggaataacaaatggtttaatataaaataaactgcagaaataatatatcatattaaaaatgtttggctacaagaagatatataaataatttaatatttgatacttttatgatataaattttgaaaataataaaaattagggatgttaaaaattcactctgtagtttaacacagattatacaaaaattttttgtcattataattaaatataaaattttctcccataccgtatcgggttatattattagaatattctatgctcaataatcctttctactatatttttttataaattcagcatcttagaaaaatcttgatttacccaatcagccgggcataaatcagaaacagttgacttcactgaagtttttaatttatatgtatttaaaagatgaaacaaaataattaatggtgttatggataaagcaataaagtatttaggaattggcataactgataaaaaatcgattttgctgattaaatcctaatttgaatttaattgtttatcagaacttaaattcagaattatatatgatacttaagtaaattaagattaacaaaatatattgataattaaagttatactatgtcacgcactggcactaaagttaatttacaatgataatagattcatatatatgatgctccgctgtcatgagaaataacaattcacagcagttttgtggttataataatttgacagcgtaaatttaaaaaataataaaaaatttggggtggcattatcgtttgctgaaaaggcgggttgtaatgttgttccgtaacaggggtggcactgccgttcgtataaatcgggttgcagcgttgttccaaaggagaattcttatgggaaaagaagcatttgatttctttcctttagacgtgcatcttgcgagcgccctttggagccgcaggcgacctaagcgagcaagcactttttctttggtgaagcgtttctttttcttgccagaaaaagaaatggttcaaacaccctattatgtaataataaatttttttatatggggtcatatacatagtaaatatatagttttttaataagtaaaataataaatattacatttatatattgaacactacgtgttcagatgttggctcacctaacgcggcggcatagccgcccttccgatgttcactaaaagcccactttttatcagtatattaaataaaaaagatacgtttgtaatttatacaacgtatcttttaacttattattccaaacgatttcgcatatgcttttattatttcctctgcatggctactttgctcaggtgacatttttaacaatatttcatttagtggattgtgattatctcgtgtgattgttccaaacaagatataatctgcatctatatctaatatcctacatatttccattaatgatggaattgataatccgcttaaacctctttcgatttcactaatatgctgactactcacgcctaatttattcgctacatactcttgagtacattttttcattgtacgtgcattacgcaaccttgtacctattggtccatagtcatattattttattcttattttctaatacataaaatcaaataaatttacacgttaaagtatttttatatcgcctgcgttcattcacggtagttcacaaagtcaacgggaaagttacaaggctttttcttttgtgcgtggagcgcaaaagaaattagcgggggcgagcgccctttggagccgcaggcgacctaagcgagcaagcactttttctttggtgaagcgtttctttttcttgccagaaaaagaaatggttcatacaccttattatgtaataataaaattttttatatggggttatatacatagtaaatatataattttttaataagtaaaatgataaatattatattattccgcggcttcgcacctcacgcggcagactgcgtctgccctaccgatgtttgaaaaacctaaaaatttttttataaaaacaatgtacaaggtttagtttcaatgttttgcatgcctctatttataaaataaatagtttatactaaaataaaaggcaacaaattaatatactttgcccatgcacaagactttgtgcttctgcattaccgcattgctcgtaagtttcgacacaatatattataatatgtttaaacaatttggaataatttggaggtaaaaataatgggtagagaggttggttttaacaacagagaccgttttgttgaattaggtcttgttatctctgcaataagaaaatctcaaggcttaacacagactgagttggccgaaagagccaaaatcagccgttcacatcttagttctattgaagctccaaatataacgcaatcattttctttagaagtgttgtttaatatctctgatgctcttgcaatacgagccggcgatttgttaaatatggaatttccatcagttgaactttattatgaaaatgaaaacaaaactaatactaaaaaaaataaaactaatggataattacattagttttattttttaatataaaaacttttaaataaatcccctcttctcgacaaagtttgctaaaatttttatttattaaattatacaatcatataaaaaaacataataaataaaaaaagcttggaagggatttaaagtgaaaaaacttcacataattataataacaatactactactgctctccgcatgttcagcagccatattcttaacccagaaccctgcggcaacagtcacagaaacatcagcgctgacatcaccatacatattatcaacagaaataacgccgtcagcggaacagccgtcacaaacagattcggcacaaacagcggaaaagcccggcgccgggcaactgacggcgcacttcatcaatgtgggtcagggcgactgtgagtttatcgaactgccgaacaatgaaacaatgcttatcgacgccggggattcgggcagcggtcccgaaatcaccgcatatataaaaaacctcggctatgatactataaactacctcgttgctacccaccctcatgccgaccatatcggaggaatgtcctatgtgattaaaaacctgaacatcattcatatgtatatgccgaaaaaatcaaccaatacaaaaacgtttgaaaacctgctccaaactatactggatatgaacatttcagtggaaaaagccgaatcgggaacagagattttaaacatcggaaacttaaaaatcggtatcttggctcctgactcagaagcatataagaacttaaacaattattccgctgtaataaaaatggactataaaaatacctcattcctgttcatgggggacgcagaaaaagagacggaagtaaaactgcaggatgaagacgttcaggcggatgttttaaaggtcgggcaccatggttccgacacctcctccacaacggcgtttttggaaaaagtctctcctaaatatgccataatttcctgcggcaaaaataataaatacggacacccggacagcacagtgcttcaaaatcttgaaagtataggctcggcagtcttacgcaccgaccagctcggtactataattattcgttcagacggcacattattaacacagttataagttaacagtttcagaagggcgcaatttttaaaatcttgactcatataaaaaaataaacacacaaattttatttgatattggccgcaaaaatatcaataaaagcctaggattgcgcccttctgaaactgttaagtacacccgtatgcgcctgatagaaatataatatatttttattaaacttgcaaaactataatgcaggcactcgtccgctttgaaaattcaatagaaaatttaagagtgtttttagtaaacagcggtagagttataaatgtgaccacacctgcaaggtgtgtgtaatacaaagttacttgttttgccattacctccaatgtctgcggcggtacttttgtttaaagggtatgtatataaacgccaataattaacttggttgtcatataataaattacttagatgtaatatatgcgcttgcacacctcaataggcggtgaactgacatatcacgcgaagcgtgtacatacttagttaaatttggataactccctttatatcagacttttccgagacttgcaaaccgcatttttatatatttttaatttaaacagctttaattttttgtctggttttcactttccacattaaaggctttaaaggaaagtgtattatggcttacacacatcttgcaggtgcggccctttatgaatttaaaaatcgttcagtaaattaacatatcttatctttcattattagataaaagactttataaaaattctcctaaaattttataaacacatgtatttttttcatgttttgggaaagacttttatctgaggtgataaaatgagtaaaaatccgaaagacagagatgacagaaacaaagggagaaatgacaattatgaccgtagaataatagtcgatccgcccagcgatgagcagaaaaagcagccggaagaggccgtttcatcaagaagaaaaggattttacataatccttttactggggattacggcaatcggaatttatgcggttctgaactcactgcttccgcacaccactgcaaaaaaaccaaatgaaaccaaaaccggctcagcctacagcactgcggcgccaaactatgacagcgttcccgcaaacgctcagacaacaccatatgacgcaagcgagccgctgagcagaaacgaaatcaactctcaaactcaaaaggcaaccgaaaagcctgacgctgaaacaacatctgattccgaagcaacagaactggttcagccgcctgtgtccggaaaaattataaaagatttttctgactctgaactgctctattctgacacgatgaaggactggagaacccacgccggagttgatatagccgccaacaaggatacgcctgtaacagccataaaggacggggttcttaaaaaggtatacgaggatagtcttttcggcacaactgtgattctgcaccatgacgacagcggaatcgacagtgtatactgcaatcttaaagacgcaacgtctgagcctattggcgcggcaataaagatgggcgatgttttgggcaaagtcggaagttcagcagtgtctgaagtgaacgaccagccgcacctgcactttgaaatcaaacttgacgacaacttccttgacccgaaacagtttgttaaatttgaagaagtagattatgttcagccggagccgtccgcttcagcgtcggccagcgctgctacttcaagcagtgcggctcctacaacttcaaacagttcggctcccaccacttcgaatcccggaacggcttcacctgacaaatcatcgcctgaagtttccggcgacgactatgactacggtgatgaagacgctgaaacaatgataattgattaataaaagaccctcctatgaacattcataggagggtcttttgtctatgatggcggacacgtcttttaagacggttacaacaataaagcggataaaaatactggggtcaagtgtaaaatcacgcggagcgtgaacattcttaaataagtatatcataatattttttactaatatttttttccgtggctgcgcgccttacgcggcaaacatagtttgcacatcacaactaagtttgattgttatatgacaactaagttaattgttggcatttatagtttatatcacgttatataaactgcagagcaataaatttcttagttgtgatgtattgcgcggatacaccgccgcgtgaattgagctatcaactgaacacgtagtgttcattatataaaatattcattataattaactttgtatataaccccatataaaataattttattattacataataaggtgtttgaagcatttctttttctcgcaagaaaaagaaacgcttcaccaaagaaaaagtgcttgctcgcttaggtcgcctaacggctccaaggagtgctcgcccccgctcatttcaccatgaagcatggcttcatggtgaaaaaagccctgtaactttcccgttgactttgtgtactaccgtgacaaaagatatttcgagctcatattgattcaatccattaaaaaagtcaatttttcagcgaacattggaagatgtgaccacacctgtagggtagatgtgattctttttaattcgttttgatttatctgcaatgtctgtgaccactcctataaggcggtcaatgtcacacactgcaaggttcactaaaaacacctttaatttttctgttgacttttataattttttattattaatataaattacatgattattatttggattgaaacaattcatacagtgtggggctgaaattaaactctttcatcagcgtttcggcttttgtttttgcagtctccctcacaggttttgaggtgctgcgctttacagcttttattaaaagatttttaggcgagtgctcaaaatccacaaactccagcatttgcactttatagccctgccattccaatattttcccccgtattgcgtcggtagccaatgctgaaaaacgttcctttatcagaccgtaatctgtgagcgcagaaaagttttctgtctctatctgtccgttcagctcatgctgacagcacggaaccgatattatagcctttgcattccatgatactgcgttgtatagcgcataatctgttgccgtatcgcaggcgtgcagagtaatgaccatatccggcggagttttaacgctatatccgtttatatcccctatttcaaagctcagtccgtcataccgatacttttcagccagtttattacacttttctattacatcagcttttaaatcaagacctgttatgcttactttcatttttttaatctcagtcagatagtaatataatataaatgtgagatacgactttccgcagccaaaatccagtatgtttatactgctgagttttaaagagtccacaacattgtccgctatctcaacaaaacggtttatctgcctgtatttatcatacatagagctaacgatatgtccgtccttagtaaacacacctaaatcaaccagcggcggtattgacgtgttttcctccagcagatactttttctttctgttgttgccggctatggcttcgtcagttttactcgcaatccgcttttttatcagactttctttgcctttttttgaaaccttcagcatatagaaaaaatccgcgccccaggcgtcgagctgtctgaagctctctgaccgcattatctcctcaacggtgcctgttatcaaatccggttctacgttctcgtgaaaaacctgtttttctgtgtagcaggcgatttgatatttctctgtgccgccgatttttttcagctctatttcaatctttttatatttgccgtctttatgttttggattgcttattacagcctttaagattctttcactgaaaattgtttttatatattccatttcagttcctcctaaaccacaaacccgccgttgacgccgataacctgaccagttatgaactccgctccgcttcctgacagaaagtaagccagctcgcccacgtcacggggttttccgattctcatcaccggggtttcggaaatcaattctctgacagtattttcatcaagccctgcgttcatatctgtatctataacccccggcgctatgcaattgacccttatattcgaggggccaagctcttttgccagcgccttagtcataccgataagaccggatttggccgttgaatatgccacctcgcacgaactgcccacaactccccacatagaggatatatttattattgagccaaaatgattgtttatcatatgtctgacaacgccgcgcgtcactctgtacggaccgtttagattgacctccataacctccgaccattcttcctcggttatatccgtgaacaaattaaactttgaaattccggcgttgttgataagtatatcaactccgccgaatttatcttctattttatcaatcatgctctcaacttgctccggcacgcttatatccgcttttataggataaccgcccgtctcctccgccagagcttctgcttcaccggcggatttattatagttgattataacgttatattcgcctcggtgctctgcaaatacccgtgcggtttcagcgccgattcctcttgaagctccggtaatcaatacagttttcataaaaaccacctttaaagtataaaggaacggtttaaaccgttccagtatttttttaaatattgaatttatcatgtataactttaactgctttttcagcattttcaagctttatcagaaccgaaaccttgatttcggaagttgaaatcatatgaatatttatgtcattatcaaacagagcctcaaacatttttgcagcaaccccggggttgttcaccattccggcaccgacaatagaaacctttgacaggtcatccctgtggttgacttctttataatttaaaatatcctttaacccttccaaaacttccagcgttttagcctcgttctcacgcgtaaccgtaaacgctatatcctttgttccctcacggccgactgactggagtatcatatcaacatttatattctcctgagcaagctgagaaaatactctgaaagcaatccccggtgtgttttcaagaccaacaaccgctattctggcaacatcgttatcacgagttactcccctaatcaacattttttccacactaactacctccttaacaagagtgcccgacactctctcaaaactagatttaacttccaattttacattatacttcttcgccatctcaacgcttctgttatgaagcacattcgccccgaggcttgcaagttcaagcatctcgtcgtatgtgatttcatccagcttttttgcgtccttacagatacgcggatcggcagtatagaccccgtcgacatcagtataaatctcacatttatctgcacgcatagcagccgctatagcaacagcggaagtatcactgccgccgcggcccagcgtcgttatattatcatatttatccaagccctggaatcctgcaaccacgataatatttcttctgtcaagttcagactgcatacgctcagtatctatattgttgatacgcgcatttcctgacgcggcgtttgtattaaaccctgcctgccagccggtcaaagataccaccgggcatccgattttttctatcgccatagccaaaagagctatagaaatctgttcgccgcttgaaagcaatacatccatttcacgctttgaagcgtcaggatttatttcattcgcctttgtgattaagtcgtccgtggtatcgccctgtgcagacactaccacaataacctgatttcctgccttataagtctcggtaaccctctctgcaacattgattacttttgcggcgtcagccacagaactaccaccgaatttttgaacgataagtcccaaaaaaacccctcctgtttttatatatcttttcaaatgagaattccatgccgtaaacacagttttccttttgaaaattctaaaataatttacttaggtattttctattatacacgctccgagattatcgggctttaaaagatgaagcttccaatccttcattttgcttataagcaccttgctgatgttgcagttaaacgcttgattgtcggcttttataattgcaattatagtcggtccggctccgctcagatacacgccaagcgcgccgttgtcataacaaagcctgaacaggctgtccatattagggataagccgctttctgtaattttgatgcagtttatcgcctactgcggttctgatgttttcatacttcccggacataaggcttgctgtcagcagcgcgctgtgcccggcgttatataccgcgtcgtcatgggacacggatttaggcagaacccctcttgattttttggtttgaagatagaagtccggcactagagccgcaaaacacaaatctttcggattaagctcagtcttaacataccgtatagcatatttggttctgacattcacggtaaatccgccgagcagagcaggcgtcacgttgtcaggatgaccctcaatatccgcagccagctttaacagttcattcatagacagtctgtctccggaaagtttattagccgcaactattcctccgactattccggcgctgctgcttccaagacccctggtaatcattatgttattttccagggtgagtttaagaccagggcatttatggccgaccatctcaaaaactcttttcatggatttatatattaagttgttctcattttcaggcaggaatttttttgagtcatccaaaatattaatctgcagtctgcccgaattattttcctcggcggtaacataattatacagccccagcgcaatacccatgctgtcgaatccggggccgatgttggccgatgttgcaggaactctgaccttaaccattttattcagccaccaatcttatctttcccaaaacgttatatccgccaagctcgccgtcaactgacacaagtttgtcaaattcataaccggtcatttcaggcgttacaaccgcaaactcatctttatatttctcgccgtccaaagttataacatcgtatccttttttagcaaacgtctccggagccgcctccgtctttgaaagcctcacataaaatcttgacggcaaagttttggcgtcgagcaaatagccttcctgcccctcgctccagcctaacctgatatgcttatccttatgcttcacagtatctattatatctgaaagcaccgcgctggctgtcggaagcgctccggcgccgcggccgtaaaacatcacgtctcccagcccctcgcctctgaccataataccattgaatacgtcatctattcccgcaaggggatgtgaagaatccagaatagccgggcaaaccatagcataaacgccgttttcagcccttgaagttatacccagcaattttattactgcgccgaacttagccgcgtattccacatcctcaagggttacttttgtgataccatcgcacggaatctcatcactgtcaacaaatttgccaaacgccaaagacgccagtatggcagtcttacggcaggtgtcgtgaccttcaatatcagcggtcgggtctttttcggcatacccgttttcctgagcgcctttcagtgcgttctcaaaagtttccccttctttaatcatttgggtcaaaatgtaattcgtggtaccattcaaaataccatatatatcagtaagctcatttgcggccaaactggtgtaaagaggtcttataatcgggatacctccgcctacgctcgcttcaaacaaatagttaacgttattgtccttagctattttaagaagttcggttccgtgttttgccacaagttctttatttgaagttacaacgcttttaccggcctcaagcagttgttttgtgaactcataagccggttttgtgccgcccatgacttccgccacaactccgatttcagggtcgtttaaaatatcctgaaagtccttagtaaagcatttatactgactgtccggaaaatctcttaaatccagtatcttcccgactgttatttcctcgccgctgcggcgttttattgattcggcgttagtggcaataagctctccgacgccgccccctacaacaccgaatcccataattcctatcttcattggtatattcctcctgctctgttatcttctaaaaacataaaccggttatcaagttaaaaatattagtcaaacttattaataactatacccgttatgagtttaggccagaaataggtggatttttgaggcattttctcattagccaaagaaatatcctttatttctgaaatctttgtcgcatttatcaaaaacgagcattgataatcgccgttctttacacagttaaccgcgtcagacgcgtctcttgtatatacaaggtgatcctggttggctaagcttgcatcatctatatcaaaatacttttctaatataagcttatgcagtattgtaacgtccaaatatttataagcattgctcttatcctttattaaatcatccattatatgaacatctttgagttcaagcaagtaataataattcccgccggtatagaacgcaaacctcttttcatcaacggtgttgcgcagtttagtcattattatctccgcaaaatcgccctcggtgaagtatatcttagacgcgttaaaatcatcggtcagcatactgattgtaagctgttcagagaagtttttaacgttttttatcattctgtgtgttggaaatacaaaaagaccgctgtcgtccatggaaacaagcatcatcatagtatagtcatacgactgtgtgccgatttcagttccgtcagcttcatgacgggcgtttctgtaattcagagcagtctcgtatctatggtgaccgtcggcaataaacaattgcttattttcaaactttttagaaataacattaattatagccgggtcttttataatccaaatattttgaataacattctccctggttgtaaaactaatatcgggagctccgtctgaacactctgaaataatatcagcgattgcctggtcaggatccatataaagcgaatatatttggctcatatttgtcttagttgcttccattaaatcaagtctgtcacgctttgcctttttcaaagtttcctcatgaggcagaataactttttttgagaactcctcaagctgaaccaaagagataatacccttcagcgaatgcgtcggagattcttcagtatcaagctgaaaaacctgctcatagatataaaatgccggttcgtcttcaaacacaagaacctgttcctctatccacttattcaaatacgccgcgcttctggtatacttgttattgtcagaatcatcgctttcaaattccataccgtaatccaagcgaataacgttatactcatccttattataaagctcctgctgttcttccgctgaaattatgtcatacggaggagctgtaaccatatctaaatctttaaatttttctgtattatatctaagccctttaaagggtactacttttgccattattatcatccttccggaataatttaattttcgcgctgacaaatgttacagcacggacaaattatcataatcgataacatatcatattagataatacaacatatttgtcaatacgtcaaggtaaatttactctgcgcatgtaaatattttcccaaaaattcctggattttttagatttaatctacaaataatattattgtgataattaatgaaattattacaaatctatttaaacatagtagaatttgttggaaaggagaaacccatgggaaaattcagtaccggtatgcttcttggaacagtgtttggaataggaattctaatgctcgacaagaagaatgttaaaaaagcaaaaaagatgatgaacggaatgcacttttaacctccaaacaccaattattaagagccgcacaaatttgcgcggctcttagttttataaacttaataataaaataatatcaaccatttgtatataaacaaatggttcgcatgttgcgtttactcgtcaaatgcagtacattaaataaattctaaagccaataaaattaatttcaactacggttaatatttaaaatataatactttaacttaaacattattctctgcatttccgtccctattaacttcaattacatcggtacgtccgagtaaatagtcaactgaacaatcaaggtaatcagcaatctttgcaagattattagctttaggcattgaattcttcatatttgacatagtattaagtcctaaattaatatctttaagcatttttttgacggtgacattgcgcatttttgctactagcctaattctatcagcaaccttgctggaaatatacataaatttaacctccatattttgtgcatttattactaatatctaaatttagatgtttcaccgtcgacaacaactaaacttagaaatgcagtattttcataacagttataagtttcatatgactataccatattacacctgtagatagtaatataattaatcaagagcagtttaactgctacaaaactattataaaactttaaaattattgttttcagtatttactgcactgctgttaatttctattacatcagtacgcccgaggagatagtcaacagagcagtcaagacaatcagcaatacgttcaattttatctactgacggtattttattttgcttttcaatatcataaataaaacctttatttataccgcatttttctaaaaggtatttaattgaaattcctttttgcttagctcttagttttattctttctgtcatttgtaagttttgcataagacattttgctcctttttgttaacaagcgataattttccacaatataagtaaaatactcggcatatttttttgcggtataataacacatttattatattaaaatcaaattactctataaaattataatttaatcatctaaaaagctattaatgaaaaattatataataaaatgacataatttgcaacaaaattaaaataaaaaatatgtatggcgattatactttaaacagttaacatctataactgccttaatattacatataaatttatgttaataatttttgaaataataatttaaaaaaagataatataatttatgaaaaaagaagcaggttttgaaaacaggaaccctttcgttgagctgggattggtaatttcagttttgagaaaagccaagggctacacccaatacaactcgaagagagggcacaaatcagctgttctcatcttagttctattgaagctcctaatatatcttcctaattttctttagaagtattcttcaatattgctgatattttagaagttaaacccggcgacctgcttaatcttaatttgccatcgtcctattttaataaagatgaagaagagaaaaaattagaagataagtagaggaagtaataaaatgtatttaaaaagatgaagaactctgcgtataaatgcaggattagggcaaacaaaaattgctgaaatattaggaatacaacaaacggtatactctcgatatgagagagggtttcaaactatactgttacattttccagtgaaacttgcagacttttataataaatcaactgattacatattaaatctcacaaatgaaataaatccacattaaagtaataatatttacaaatatattgaacactacgtgttcagatggtagctcacctaacgcgcttgctagcgcaagcctaccgaggttcactaaaaaacctacttttttatgtattataaaagctgaaaacttagttttttgataagttaaactaataggaactcggaatatttttattcacggcagttcacaaagtcaacgggaaagtagtagggcttttttcatcatgaagccatggcttcatggtgaaatgagcggggtgcgagcgccccttggagccgcaggcgacctaagcgagcaagcactttttctttctttgcgtatacatattattgacattgtaggtaatggcaaaacaagatactttatattacacacaccttgcaggtgtggtcacaggtaaagcgtttctttttcttgccagaaaaagaaatggttcaaacacctattataagtaaaataatatatattatatggggtcatatacaaagttgatatatattatttttaataaacaaaatatatttattaaatttatatattgaacactgcgtgttcagatgatagctcacctaatgcggcgcataaatgcgcaatacatcacaactaagtaatttattgacactgtaggtaatggcaaaacaagcctctttgtatcacacccaccatactggcggggtcacaatacatcacaactaagtaatttattatataacaaccatgttaattattggcatttatagtttgtataacattatatagcttatataacatacacttttaaacaaaagtgtagccacaattgacactgtaggtaatggcaaaacaagtctctttgtatcacacccaccataccggcggggtcacaatacatcacaactaagtaatttattatataacaactatgttaattattggcatttatagtttgtataacattatatggcttatataacatacacttttaaacaaaagtgtagccacaattgacactgtagataatggcaaaacaagttatttagtatcacacccacctgaaaggtggggtcacaggccttgcaggttcatcaatacaaactactttggcttacacgcaccttttaggtgcagcaccttgcaggtttatcaaaataagacagtttggttataaaatataatcacttatgataggttattccggcgcttattgtaaacgccctatatatctgttccagcagaattaccctcatcagctgatgcggaaacgtcatctttgaaaaactcagctttaaatcagaaattgattttatgctgtcatcaaggcccagtgaccctccaattataaatactatatggctttccccggtaacagaaagggactctattttttcggaaagctgttctgatgaaagctgctttccttcaacgcaaagggaaattatatatgcgcctttcggtattttcgccgcaatcttctcggcttccttatttaaaacaattttctgctgcccgtcctcgttgggttcatctttaacctgtatgatattaagcttgcaaaatctgctgagacgttttttgtactcgtcgacggcgccgcaataaaacttctcttttatttttccgacgcaaatcaaagttatattcaacataatatatccctctttaaagcttacataacaataggtgccgcaaactgtacggcacctatttatttaagcgtttggtttttctttaaattctgtcttcttcatggaaacgtcgccggtttcctcttttatatctttctcttttctggcgttatccgtatcattcataacctcaagcgccgcgtcaatcgcctcagcgtcgccggtttggaacagagcgtcaaactcgtcgccttcaattttttctttttcaagcaagagttccgccacttttttgagattttccatattttctgtgaggattactttacatctctcatagcattcacttataatcctatggatttcctcgtcaataatagctgcagtttcctggctgtaatcagccgaatgtccggcttcgagccccaggaacacctcgccgttctgttcgccgaatgttcttgcgccgagcttttcactcattccatactttgtaaccatgctcttggcgattttggtagcgcgctccaaatcatttgaagcgcctgtgcttatatcatccaaagttaaactctcagcaacacggccgcccagcaaaactattatttcttcaaccatttcggttctgctgttataactggtatcctccttagggagcgacaaagtatatcccccggctctgcctctggggattatagaaacctgatgaaccctgtcctgtgtcggaagcatctttgacacaaccgcatgaccggcttcgtggaaagcagtaagcttcttttccttatcggttacctttttactcttcttttcaggcccggcaaccactttcatgatagattcttcaaggtctatcatgtttataaccttcttatttgcgcgcgcggcagctaaagccgcctcgtttacaaggttttcaaggtctgcgccggtgaatccgattgtagtcttagctaaaacgttaagtttaacgtcatcgcccaaaggcttatttttagtgtgtacttttaaaatcgcttcacgtccgacaacatcaggcgcgtcaaccaatacctgtctgtcaaatctgccgggtctcaaaagcgccgggtcaaggatatcaggcctattggttgcagcaattataataacgccgtcgttctcaccgaaaccatccatctcaaccaacaactggttaagggtttgctctctctcgtcatgtccgccgccaagtcctgcacctctgtgacggcccactgcatcgatttcatctataaaaattatacatggggcgtttttcttagcgttttcaaacaaatctctgacacgcgacgcgcccacgccgacaaacatctcaacaaagtcagaacctgatattgagaagaacggaactccggcttctcctgcaacagcttttgcgagcaaagtcttacctgttcccggagggcccaccaaaagtacgccctttggtatcctggctcctaaacgcctgaatctttccggcgtttttaggaactcgactatttcttcaagttcggccttttcttcctcttcgcctgctacatcggcaaaagtttttttcgactgcccttcgttggtaagctttgccttgctctttccaaagttcatcataccgcggccgccgcttcctgactgctgcataaacatgaaccagaatacagcgaaaagcaagaccattccaagcgttggcagccatgttacccaccaaggtatactggacggaagaggagtctcaaccttaagcgacccatcctttatctgtttttccatctcgtctccgacgtcgctcctcagtgtttcataacccggaacttcaaccttaattattgaatcgctgtttttcatctttaccgtagcaacatcgtcagctatactaatctcgctgacttcgtgattttggatatctcttactaattctgaatatacgtctttatcctgtttaggcgtaactctcgtcataaaaaataccataaggataactaaaaacaacagcaagtaaaacccgataccctttaaatattttttcactctgtcgcctcctgtcaaaaaattttgatacacatataacaccagtttaaatgctattttaatattgatacaatgagtgattatatcatacataaaataaaaatacaaccaaattattaatatcttaacaaaaaattcaaatgttttgttataataccaatacgccccaattttaccttatgcccgttttaacaaacttatcaataatatttactatttaaataactttctgtttttatcctgcccaaaatttactatttcaaaaccaaaatcatatcggattcatcggaggaatttttcggtacgtcaatcacatccgaaaaagcggtctctttatctaaaaacacaccgcttgccgggtcataccaacgggctgatacaggtttaaattccagcgcttcaagatttaattcaaaactgcggccgctgtagttataaatcaaggcaaagtcttttcctgaaaaagctgtgatacggtcgtattttgtgaaaccgccgttatttattaagttatcgttatgtttaccgtcttgaaaatttacagacgtcataagattatacaaatatcccatctgtgctgaacccgggtcgttcagggcttctctccagcaggttttaacattataccctgcgtctttgtcgttttccctatagaactgcattattgcattatccccataggtatggccgcaggctccttcaaacactgaccagtacgcatatcttcttacatcttttgctttccataacggctgtgaaaaatcatgcagtccctgaggtatattttcataagaaggctctccgtcaagaacaggttttaaaggcgtacgcgcaagttctcttcttacatatctccaattatcttccccgtaaaaatcttctgaaacattattatcgtcccaaaagcccagcgagctttggtcataacgcctgtgtccagactgaaacatattaaaatccagccagccgcagtcattaaaccacatagcagacgaggttctgccgaacggatggaatgtaaccagctgttccggcgcgtatttttttatcgtgttgcccaatatgttccatacatcaaaaccggtctcgccccttatatcccccccaagaatccaaataacgttctcatgctgtccgtacctgtcagcgagatactttccatagctttccgcattatcagcgtttaaatatccttttttgaccatcgatccccacaccggaagcaatcccatatataagccatagccggcagccatctccacaagagtatctattttttcccaatagccgctgtaactgcagattttagaaaaatcattatctagcacggccgtgattttttcatccggctcttcaacattcatattatgtacaagaactgtctgaattacattaaaattcttttcggctctgtccgcaaaatatacgtttgcttcgtcagcggtcaatttctgagctaacagccacgctgtatccccaagccaaaaaaatggttttagttctccggaaatatctttttttgccaaatttttattatttttgtaaacagctaacattttattcacctcattatatcattttattatcctgcaattatatcacatacgttcagaaattaaaacaataaaatacgcaagtccgaatttggacctgcgcatatgtacagattatttttctttagcccattttcggcagttttccaatctgggctttgggtcaaatcccatttcaacgcccatggtagagaccatttcacacgggaattcttcgcattcaccgcaatgattaagccctttgctctcacagcaggttttaacttcacattctccgccccaaaaagtttttttcatcgttaaacatcccgtacagccaacctcttcttttctttcgcaggaatcgcactcgattccgcatcttgattcaaacatatgtaccgcgtctcccttttaatatttggaaatgcgcaaaaaagcttttttgttttttataattatgtcaagttatcaatctattcttccgcctcttgcacatttccgttttattttattttatttttattaaaattcaagttcagaaattacttcttttagagcgtttgccgatttcataagatgagtgcactcgttctcatttactgttatcggaacctttgtctctataccgtcctttccgactattgacggcatactgagaacaacgttttctataccatactccccgtgcatcatagacgacacaggcaaaattgatttttcatcgcggagtatagcctcgcatatcctctttacagacatagctataccgtaatatgtcgcctttttcttttctatgatttcataagccatatttttcacactgtcggctattcttatcattgcttcttcatgattaaaataacctctcatctcacagaatgaattaattgggatacccgaaacgttagcgctgctccatgccgctatttcactgtctccatgctcgccgattataaacgcgtgcacgctcctgctgtctacccccaaatgctgacccagctgatattttaatcttgccgtatcaagaaccgttccggaacctattatcctattttcaggcaaaccgctcaattttatagatgtatacgttaaaatatccacaggatttgaaacgataagcagaattcctttaaaattgcactcatttatctgcggaattattgacttaaaaataccgacatttttatgcaccaaatcaagcctggtctctcccggtttttgcccggcgccggcggtaataataactatagccgcgtcggatgcgtccttatattcgccggaatatattttcatcggtctgtttaaaggcacgccgtgacttatgtcaagagcctcgccctccgccctgtccttatcaacatctatcagcaccatttcagagaacattccgctctgcataagcgcaaaagctgaagctgaacccacaaaaccacatccgattaccgccacttttcttaaattgacatcacaatttgaatttttcaaagtgtattcctcctttatactataattccagtatacacattattataatccataatatatagttttatccaagagcaacatcaagaatcatcataattgtaaaaccaacagcaacgccgatagtggcaatattgctgtgatccccggattgagcttcgggaatcagttcctccacaacaacgtaaatcatagcgcctgccgcaaacgcaagtatatacggaagtattggaacaatcaatgatgtgagtattatagttattatcgcgcctatcggctcaactaccccggaaagaatcccgtataaacaggagcggcgctttgagattccattcccaagcaaaggcattgatataatagcgccctcagggaaattctgaatagcgatacctatagcgagagcaaacgcgccggacattgaaatagcggcgtttccgctgagcactccggcaaagacaacgcctacagccataccttccggtatgttatgaagcgtcaccgcaaaaataagcattgttgatttgcgaagttttgcttttcgcccctcaggtttatcggaattcaaatgcaaatgcggcgttatactgtccagcagaagcaaaaatccgataccgagcaaaaaaccaactgccgccggcacccacggaatggatccgttctcctccgccatatcgatagccggaataataagcgaccacacagaggcggcaatcattacgcccgaggcaaaacccagcaaaactttctgcagcaccggctgcattttatctttaagaaagaacaccatagctgcgcccaaagatgttccgacaagcggaataattattcctatacaaatttttatagtatcgttcaaaatatcacctgattcatttaaatttctttaattacataatcctaaaaagcccgtctctgctgcacaccaaataaatttttgcgccggaaatccgcggaattctaacctctccgccctgttcgggatacagtctgacaaccaaagccctgtcatatcccgtacacagcacataatttatataatgctccttttccattttatgcccaaacgatatataatactccccatctattattttaacttcagcaagatgtttttcgtctatcccattttctatcataggctcaagtttgcgtccacagcatatcacgtcagcgccgcttgccgcggttactagatttccgcaaacagggcagaaataaaactttactttcttcatattccctccgtcagtctctctttcgtttaaatcgccgtccagcatttttcctaaatctattccgaatatatcagataaatttttaagcagtcccacatccggcagacccagtccgcgctcccattttgaaacggttctgtcgctgatattcattttgtcagccaaatatttctgcgtccagcctctttcttttctcagcttttgtattaactctcctacttttctgcaatccattttatcacctcccggctcatttttattacattgccgtcaaaaattactttattttacttatttattatactgtgataaataagactgcacaacaaacgctccgtttggatgacaaaaaccgctgaacctctaaggattttgagttactttatttccactcgctgcctatttccatatctttgtagtaatactttttatctctttcgccgatttctctcataactctgcacgggcttccaaccgccacagtattgggcggtatatcttttgtaacaacgcttcctgctcctatgacgctgttgtcccctattgtcacgccgggcagaacgattactcccgctcccatccaaacgttattgccgattctgacaggcaaattatactctatacccttttcacgcagttcaggatatataggatgcccggcggttacaatagttacgttgggtccgaatttaacattatttccgatatgtacctcggcgtcatccagaagtgtaaaattgaaatttgcaaagaagttatccccaacataagtattgcatccccatgtagcggagaatgggctgagtataaaacaatttttccctgtgcggcctaaaatttctccaagcattttttcccgcttttctgtatcatttatgcttatattattatactccaatatgattttatctattttaggaaactgttcctttgctatttcagggtccatagggtcataaagctcaccgcttagaatctttttaaacttatccatatttgttgtctccttttttaaataaatcatatcaacaagctgttttccatcctcaaacataggatggtcataattatcaacaaaaaaattcttaactctatgcgactctttaaatccgcacgctttatagaaattaagggttttctcagaatcccccgttcctacgtacatagtatcgcagtcgttataataagataatatatactcaacaagttttttcccgtatcccattctttgaaactcaggagcgaccgcgatatttttaagctcatacaccctgtcttcacactttacaacaacgcactcggctttaacaccattgtcagcggcgacaaacatatcgcctttatccaaatacaaatctatcatgctttcctgctcatcgcccaacaaaagaagatctaagtatttctttttattgttctcaacttttattattttcatataattgtttaaactttctccttatagatttctgaaccttctataattttaacagttccattgcttatatcgacaatacgttcctttaatccggcacagtcacttatcggaacatataatgaaagctctacgctgtcggaatatagtgtttcaccctgtatgaattcccagctgtgcagttcattctgaatctttcccagcatattgtaatcacagataacagaaagctcacggcacagtatcatttctaaaatatttgccgctaaaactccggcctttgcgctttttgaatacgtatgaaccaatccgccggtacccagcaatattcctccaaaatatctagtaacaacaacgaccgtgtttgttaatccttctttttttaacatatcaagcacaggcattcctgctgtgcctgacggttcgccgtcgtcgctgtatctcattacaccattttcttcgacaatataggcataaacgttatggctggcgtcccagtatttttttctgagttcgtttataaactctacggcttcatgctcgctttccacaggttttactgacgcaatgaatctggaacgcttctcgactatttctgcgctcgccatattcttaacagtcttatatctatccttcattttagtttctccatatgttctttttataaagttgattatatcactaacacaatcaattatcaatagttctgatttataaatacatattgagtaagctacggctaatttacaaaatattaacacctaaatttctaacatatgataaaattattaagaatggaatttctttttaaaacgtcagaaatattatatgaaaaacaccaaaattattatgaggtgattttttatgaaaagatttaaaaccaacattttattttccatactattaatttttacaatcagttttcttacctcctgcacagggagccataattcaccgtatacagacggctccgggaatttaccggcaaacggagcgtacggcgcgatactcaataccggaaagtctgatgcaataatacttacagttgatggagaaacgatggttatagacgccggggaaactgagaacggagacgatgttttagctcatctcaaatcctgcggcatagataatataaaatacttcttaatcacacactttgataacgaccatgtcggcggcgcagctgcagtcgttagcggaacatcagtccaaaacgtgattatccctgattacgtaaggaacagtaaaaattataatagttttatgaatgcgttaagtgcaaaaaatattgagcctttaactcttaaaaacgacatgaatatttctttgggaaacgcagttatttctctatatccgtcgaagagaactgagccatacacaaaagacggagacgacaacgccttctcaattgtatctattgcagaatataacggagttcggctattatttgccggagacgccgagagcgagagaatagaggaactattaaattcaggcattgaacttgactgcgattttattaaggtgccccaccacggcaaaaaggacggaaacgaaagtttagaacttgcagaagccgtctctgcaaaatacgcggtaatcaccgacagcggcggcgaacctgcctcagaaaaggttttgaaagcatataaggatttgggaacagaagtctttgaaaccaaaaacggtgcggtgtactttaaaatcgatgataatggtccggaagttctcggcgcagaaacttaaacaacgccgccttaattgttattttttgccaaatatattaccgtttatttaaatagtataaaagatttaaaaatattttaataaaaaccttgattttttaagagaagtagtataaaattagtgtatatgtaatggaaatgtaattattcctattttttaattgcattgttttgtgtttggtttttaccgcctttaggcgaagtggtatagatttacatataattcattggaaaactatgggggtgctaaaccggtatgggtaaaaaagtcttggtcgttgacgatgaaaaaagcattgttgaaattttgactcttaacttaaaaaatgaaggatacacggtatgcgaggcatatgacggcgaagaagccgttaggaaggcggaatccgaaaaacctgatttgatactgcttgacgttatgcttccgaatatggacggcttttctgtctgcaaaaaaatcagagagacttcttctgttccaatcttaatgattacagcacgtgaagaagaagtggacaaggttttagggcttgagctcggagctgacgattacataaccaaacctttcagcgtacgtgaacttttggcaagggtcaaggccaatatgagaagaagcgatatagttcctcagcaggctgaggttgaaaacgatatagttgaaatcggctgtttcactcttgactgtaacagatatgagctttataaaaacggaaagcttatcgatttaacagtcagggaatttgaacttattaaatttctttcagcacagccgaataaaatatattccagaaagagtctgcttgaatatgtttgggattatgagtactacggcgacgtcagaactgttgacgttactgttaggcgcgtcagagaaaaaattgaggacgacccgtctcagccaaaacatataatgactaaacgcggtgttggttattactttgcaatataatttaattgagccgaatttgatatgcacctccaaaagtgtctaacttttggggtgcatatcatttttaggctcttttttattgcttatttatatatggtagtgaatattttaacaattatcttccaatatttaaaacgctcttgactttctaactgttttatggtacctttttattatgaaatatgtcgaaatatgtaataacatataggatttattgccgtatataacaattggggggtattatcttggtaaatattcaggaagaaatcagcagccgaaaagttggaaacgctttatattttgattaccgaagattttttggaatgctttccgtgtggctcgtatgcgccatattctcgtttttcccccttattttaagacctatgtttaccaatgttgctgaaacaatggatattggatactggattatggtgttcagtgacaatgatgttttatatcttgtcgttgcaatatcagtagtcgccgtgggtatgtcgattttaataggaaaaaggaactctgtggctgtatatctcattgcagtcttggaggttgttgggatatttttggctatgatggggtatttaatgctggaaggagaccctgttttgtttggagaaacagtatataaaattaatatttgggctgttactatatcagtcgttttagcttttgtattattcctgtcagttagtttcagggtacgagaaggagctgaaaaataatgaatatgggattttctttcttactggcctctgttataatcaccggagtatgcatacttatttgtatagtttatatgtcctataaaatctcggaagcctggcactcgacgcggcttatagacgctgagttccccagcactacaaaacatcttaccaaaaaaaatgtgaaaaaacttgaagatttttataacagacccgcatccgaggcaaggtttgctatgggactgttctattcagatgaaaatgttaacgctctgagaagaaaaacatcgccgattaaacttccgaaaggtaggtataatatatgaaaagacaaaaaactgctgtcgctgaccaaaccactaaagtcatgccggttgtccaaaatgataaaaatataaaaaagacaactgacggcgcccctgacaaggatagcatagacgcttcaaacaaagctttgtttgaaggaataaactcttataggaaaaatgagatgactgagaatgaatattgggaacgtattttctatgttcacctcaaaacaaaggaactgtatatcttagctgaagagtacggctctgaacttcagactttctttcttccgataaacagccttaaaaacgcgtatgagaatatcattcatgtgtgcgccaacgactatatggcaagaatcggtaattccgattccaacccaaagtatgttctcgacaatttaagggtcgctttggggcatgagtgcaaagcattctttgatacggcggactttctctcaatattactcagaaagaaaatagctgaatgcttaaacggctttacatatccgcagattgcctcagtgtgggacgattacaacacagtcagacttcagcttatacaaataaatcaagaaataagcgaaattagaaaccgcaagtctgacacaaacgactactatatagacgaggatgttgaaaaatactattttgaaaccaaaaatctgctcgactggtatatttttgtggaagaaaaggtatacccaaagcttgagcagcgtttcaacgacatataaaattgactaaattaaatatatttaaaagaggttttataacctcttttttgaattttgcggaaaggagcctaaaaattgaacgatattaaaacccgcgctaatgatttttcaaagggaagcattcttaaacatatactgcgtttagctatacctatgacgatagcgcagctgataaccatactatataacatagtggacagaatgtttatagggcgaataggcggtgtggaaacgactgacgcgcttaccggagtgggagtctgccttcccatcgttacaattataatggctttttcaaatctgataggcgccggagccgcgccgctcatatcaattgagcgcggccgcaacaacggcgaggaatcggaaagtattctcggaaacgcctgcagtctgcttataattgtcggtatatcaatctctgttttgggcttatgttttaaaactccgattttaaagcttcttggagcgagcgacgcaacactcccatacgctgattcatatatcactatctaccttataggagccattttcccggtgatagctctggggcttaacagtataataaacgcccagggctttggaaaaaccggtatgctcaccatagctatcggcgccatgctcaatattattcttgacccgatactgatttttgtatttaatatgggcgtggcaggagcggcgattgcaactgtgatttctcaaattgcttcagccatttggacagtaggctttttactcagcaaaaaggccacatataccataaaacttcgccatatgataagacttaattccagaaggattaaaaaaatactgtcgctcgggttggcagggtttacaatgctcgctacaaacgcggcagttcaaatggtctgcaatatgacgctaaaacaatacggaagcgatttatatattggaatcatgacgataataacatctgtcagggatatacttgttctgcctgttcagggattttcacaaggtgcccagcctgtcctcggatacaattacggggctgaaaaaaatggcagagtcaagaaagcaataaaatatatgtctgtgattttaatatcatatactgttttagcttggatgaccgttgctgtctttccccaattttttataaggatttttacagagaatgcagatttgcttgccggaggcgttccggctctgcacatatacttttttggttttttctttatggctctgcaattctgcgctcaaacagtctttaccgctttggacaaaccgaagcaagctgtttttttctctatgttcaggaaaataattattgtggtccctatgacagttttacttccaattttctggacgccgcatgtaaacggcgtgttttgggcggagcctatctcaaatctgataggaggcgctgccgctttcaccactatgatactgactgtatacaaaaagttgtgattaattaatattttaaggctataatataattatagcttatatattgggaagtgataattccatgaaatcaaagacgttaaaattaatttctgagcacgattcgcttatacttagcgtaatgttatgcacgcctgataccaccgaaaacatacaggggatacttcaattttcacatggtatgaccgaacataaagaacggtatttaaacgttatgaaatactttacttcaaaaggttatatctgtataattcatgaccaccgcggccatggaaaaagtgtgaaaaaccgtgatgacctaggatatttttacgaagacggtgctacgggtatagttgaagatctgcgccgcgtatcagagtacgtaatggatctttacccggggctgcccctatacctgattgcccatagcatggggacattagcggcacgggtgtatttaaagacatatgattatataccttccggagtatttctgtgcggtgcgccgagctctgacaactctacgggcgtcataacccctgtgctagacaaatatgccaaactccggggggaccattataaagaccagctgataaacgacctttttgtcggaatctttgattttgtatttaaagacgagaaccaaaaaagcgcatggatttgcagtgataaaaacgtagttgacgagtttgtaaacgacccgctgtgcggattttcttttacgattaacggatacaggggcttgctggagcttctcaaccgaacgtatctcgacaacacattaacagccggaaaccccatgcttccaataatatttatgtcaggctgtgaagattcatgtatgctgggatacaaaaaacatatcgaggcggtttccaaacagcaggaagccggatattattatgtaggaagcaagatgtatgccggtatgagacacgagatactaaatgaaattggcaaagagcaggtatatgaagacatattaaagcatatcgaactctttaaacagatgaaaaaaatattatagaaaatagtaaatttttggtgattataaaatgcttttttcagccggaaaggcttatgaaatcagcatttctgtcatgtgaaaaaccgtcctgcaaagagtaaaatggtgcccaagcgaacatacagttataaacagcagcatgaagtaatgaaacgaaatgagctgtttgacatttccatgcggctatattaaaatgaaaaaagatagttatgggcttgtaggccttaggcggataaaacgtatttaacaaattggaatttggaggttaattatgaggttagacggttttggattgctcgtaaacgatatgggaactatgattagattttatagagatgtgctcggcttcgcaattaaggaaaatgagcagacatcgaatgtttatcttgtgaaagatggcacattgtttttgctttatggcagaaaagactttgagaatatgacaagcaaaaaatatgaatatgtgaagggcctgaacggtcattcggaaattgcactttatgttgatacttttgaagaggtggatttggaatacaaaaatgcaataaataaaggagcaacggctgttttggaacccacaacagagccttggggacagagaacctgttatatagctgaccctgaaggaaaccttattgaaattggctcgtggaacaaaccctttgaaacaaaagacaaatgacaaatcccagtttgccgggctgattaaatgcgccttatttgcataatacgtattccttctttagccgttttcaatagtggcaagcagggcactttgccctgcttgccactattgttttcggtggaatcggaattcccgccgcgcatgaaaatagccccggtatgagatagcacacttctcatgccggggcttgttcagactgcgtctgcttaccgttagcagcttttcggggattgctttttcagggcatacgctatataataaggctgtcagcaggccggacaagggcttgctgattttttgttttgtggtgcccaaatggtgctgggctttacaaaaccatgctgttacagattgtgccggtttagtcgccggatttgaggaaacgcccatttcatgcgggttcgcagggagctatgaaacagcttgccgccttattacgcctgaaattgctatcctaacgataaaaaatttgattaaaacaaaaattttctacattgtagccactgcgccgtctgcggcggctgttgccagctgtctgagcggttttgttctgcagtctccggctgcgtagatcccatcaatatttgtcttgcagtcttcgccggaaatgacatatccggcggcgtctaactctaccaagccttttaaaaaaccagtgttcggaatctgtcccacggctacaaaaaggccatccacagccagccctgaaatttcaccgcttattttattctgcagttccactccgttcagcctgccgtcctcgccctttttaaacgccgttactgtagagttgagtatgaattccacgtttgatttttgtttcagcttttcaaccgtggattggtcgcctctgaactcatctctcctatgaataatatatacagtctcacataatcccgataagaattccgcgtcctctaaggctgtgtttccgcctccgacaacggcaactttcttttctctgaaaaaggctccgtcacaggttgcgcaataagacacgccgagaccaactaaatcctcctcgccatcaacgccgagattacggtttgctgcgcctgtggctattataacacgttcgcattcgtactctttatcggcagtcagcactgttttggaattatcgttaacctttattcccacgacttctccataatctatctctccgcccagctccaatacctgctcataaagagcggtagcgaaatcaaacccggatatgttttttataccggggtaattttcaaccccgagagaattaacaatctgtcctccataagtgtttccctcaagaattatcgcgcgtttgccttgtcttgcaagatatattcccgcagtcattcctgcggttccggcacctataatcactgcgtcgtacattgtctcacctctattttataaagtcaagcaaagcggctttcgattttgcgccgacagatttgtttaccggctgtccgtttttaaataatataagggtaggaatagacattacaccaaatttacccgccaaatcctgctgttcgtcaacattaacttttccaacctttatggtctgaacctcttcggctatctcgtcaacaatcggagaaagcatacggcacggtccgcaccatgaagcccaaaaatccaccaataccggtttttccgaattcaatacttcagattcaaaattttcagatgttacagttattacatttgacataagcttttacctgcaaggtttatcgccctgcttttcctttctgaattttaatattttaatttataattttattcgaaaccgcctgtcttataagctcaattacattgacgtttcccataagcccgctgacagttatccttgtcatattctcaaccccgtctcttgggatattaacctcataatctatatcagtggcgtcgtctccaaccaaacactgggcaataaatcccgccttgtgtgaagcgtcgatagcaatatcagaatatgaaccgtaggggtatgcaatcatatcgcatgttttccccaagttcttttctatcaaatatttagacttgcgaagctcgtagttaagagtgtccttatccagctcgccgagtttaacatggtcgtttgtgtgcgattctatatcaatgagaccgctgtcctgcatctcttttgcctgctcccatgtgaagtgtgaataattcacctttccgctttcctttgtagcccctactgtatcggttactacaaaaatagtcgccggaatctcgagttctttcaaaatcggaaacgccacttcatagtttgacgagtatccgtcgtcaaatgttattataataggatttgttgggatagtcttagagccgtcacggcatttcacaaaatccacataatctcttaatgatataggagtatactgcgtcttaatcgccgtcatatgcaaacgaaaatctcttggtgagataatagatatcgcatttgagctgtcaaaatcatccgatatatggtgatataacaatattggcaccttaacaacatcagcttccggtgttccggctctaacctcattaggaggctgcgtcgccgacggtttttgggtaggcgctgctgttggttcaggcgtggcatctgggttcttagtcggttcaggcgtagcgttcgggtcttttgtcgaagccggagccggagtggcggtcgagtatatatcctttatccaagaaggcggatttcccgtctctgaatttgcgcttgaacttcccgtagtatttccaaaagcaacattaacgctgccatcataatcaagaccggtttcttcggcaaatgccgccgttccataaaatgaaattgatgaagcagcaatcatcgccgctaaaaccagggataatttcttcataatcaattctcctttattgtttacttaaaaactttttctattacactaataaattcatcgttattctgtgaacctacaatgtatctaagtatagtctctgttacatctgctgtattctgtcccacaagagccctgcggatacgccaaacagcttccttttctctctgacttaacaagagctcttcttttctcgtgcctgatttggctatgtctattgccggaaatacacgacgctcctgtaactttctgtcaagatgaacctccatatttccggtccctttaaactcctcataaatcacgtcgtccatgcggctgccggtctctataagcgcggttcctaaaattgtcaggcttccgcccccttcaatatttctggccgcgccaaaaaatcttttgggcttatataaggcgccgggatccaatccgcctgaaagagttcttccggttggagctatagttaagttatacgccctggctaaacgggttatgctgtccagcagtataacaacgtcctttttatgttcaaccaaacgctttgccctttccaatacgatctctgccacttttgtatgattctgcggctcctcgtcaaaggtggaatatataacgtcgccctttatgcttctctgcatatcggtaacttcttcagggcgctcgtctatcagcagaactatcaaattaacgtcaggattattttgggttatactattcgctatatttttaagaagcgttgtttttccggctttaggcggagcaattattattcccctctgaccttttccgacaggcgctattagatctattatcctcatagaataatccgtcttgactgtctcaagtttcaaacgctctctgggatagataggcgtcaaatcctcaaacgcttttctgcgtattgacacatctaccttatcgccgttaacggactgaacataaagaagagcctgatacttttcaccctcatgctgcattctcgtgtttccgacaatatagtcccccgtcttaagtctgaatctcctaatctgagcctgaggcacatacacgtcgtcaggacccgactggtaattatccgacctcaaaaatccatatccgtcttcaagaacctcaagaactccgctcattaagtttgtgcggcgaaccgggtcgctgtattctataacttcattttttgcaggctgaacagccggtttatcatttttattttctccgcccgggcggctgttattctgaggttccttttctgaaacattatttttttgcaacgcctgattagaagcttctgacggattcttaacctcttcagtttttcccgatttttcattttcaataaaatcagaaaccgcttcaataagctcctgtttcttgagttttgaaacgcctttaagacccagatttttagcatattctctgagctcaactatcttcatattttctagtttctccatttcagcggagctgcttttcctgttcattaaatcctcctactttgacgataagttatcataatccgtcggcgtaaccaactgcactatcgggttgttttcatacatagcttttgtcagggttgattctgaaatatatttttgagtattttcattctccctcagcggggttatagcatatacaagagccaaaactaaatatattatgataacaccctcaattattccaaataccactccaaccgctctgtcaaaaaatcttatcacgggaagtcttgaaacgatattaaccacttttcctataatagaaattaaaattcgggttataataaacaccgacaaaaacgatatcaagtttaaaaccaaatttgtaataaagctggttaaagcgtcatttaaagccgtctgtccggttgccaccatgcttctcatgtattccggcagcgccgtcgcagttaatgtttccgaggctattttgggttcaacatatttcgtctgcacaattgaacgaatcatatctccaaaagcgcttccgacaataaaatccttaatataaggataaaggatatatgccaaaattatgctcgcaataaaagccgctaccttatatgcagattttaaaaaaccgtttttataacccacccagataaaaattgcgaaaaaacatgctgttagaatatcaagcaccgtgaaacctcctagaatattttccgacaaactctgttattttatcctgacaatatcagccttattccctccgagaaccaaaacattgcgttcattcccatatatacctatgctcattatatcatgtgatatctctatagattttttaagttttcctttataatttaaacatataaggtttctggaagtcgctgcgattatattgtcattataaccggcaatgttttttatctcgtcactgcttgtatagcttccgagatatttgcccgaaatactataaatctcaagcactgagtttcccctgctgtccctgcacaggaacaacagattatcaccgttttcaacatcatatttgacaggtgattttccggctaaatcaatttcaaaattcttattccctttttttgaaaatccaaatatcttgctttgtccgacagcagttatattgctgtttttatcaaaattaattttcgcaatgagagtgtcctcgcaaattgcagtgccgctctcctgtccgtttgacgtattcataacccgaatctttgaataagtctcgtctccgtcgctcatcatctgcgcaacggcaatatacttgccgtcttttgatatatcaacgtccgttatatatccctctccgctgttccatttaaacacctcgtcagcctttttattaaaaaccaccactgtgcccttataaccttcttcggcaagcgcggcaaccgcaaatccctttttattgactttagctgacaatatatcagtgcttattggatagcttactatattgttcccatttgtatcatacagattcaagctgttatttccgtccaggtccgctaaaagcgcatattttccggcaatatctattgtcggattcgtgagcgtcatttttatattccaaacgtctccgcctttgttgttaacatccttgattccgcttttgttaagcagcaaaacatctttgccgaaagcatactgaatatactgtcctcccgtatcaaactccaaatccgaatatgcacggtatgtagtattcggaactataacaatatttacaaacagagccaaaagcactgctaaaaccgccgcgataaagcttaaacgaattgcgttgatacggacgaccttacctttgacagtaatattttttatactgcttccatccatcttttttataaattttactgcggagtcatactttctctttaaatagttgcctatctgagagaagctaaactctttgttgagatcaaatttcatatcaggtcatcctcagctataaatatactttttttagaaacaacccctgaggcggagctgtaataccgccttggcgtctgtctttactgcatataatttcaggaatatccgaaacctcaattctgccggtgcctacatccgcaagcgtaccaacaattatcctaaccatattatataagaatgcgtcagcttcaacggttattgtcagcagttcgggaaactccccgctctgctccgctccgcatacgctaatagttctgacagtcgttttctgctgtcctcctgccgccataaacccagcaaaatcatgctttccctcaaaaaaaacagcagcatcttttatctttttaaaatctaatttgtatggaaaatgccagctatatctatttaaaaatggattttttaaagcgctgttccaaatattataaatataccgctttccgtttacagaaaaacgcgaattaaaatcatccgccgcaacccaggcttccagggcggttatatcgtcttctaacctataattcaacgcgtacggcagtttttccaccgggatttttgtttctgatttaaaattaaaaatataatccaaagcatgtacgccggcgtcggttctgctgcagcctgtgacttttacatcagacccggtcagttccgaaagagccttttctatagtgctctgaacagttaccccattagattgagactgccagccgtggtaatttgttccgtcatacctgattctcattgcaatattttttatattttccatattaaaaacttccaaatccaaaattcagtgaaagaattattccaagcaatattaaaacatataaccagctcattatatctattcctgagaatttaagttcatagagcctggttctgttctcgccgcctctgtagcagcggcattccattgccgtggcaagctcgtcagccctgcgaaacgcgctgataaacagaggaataagtatcggcaccatggcctttgccctgctcagaaggcttccgctgtcaatgctggcccccctggcagactgagctttcataatcttatccgtctcatccagcaaggttggtataaacctcagcgcgatagtcatcatcatagctatctcgtgcgccgggacatgaatttttttaaatggggtcagcaggtattcgagaccgtctgtcagcgctatcggagaagttgtcaaagttaatagagatgtgcctaaaatcagaaaaatcaacctcagaaccataaacgccgcaaagcgtataccctctttggtaatggtaaatatccaccaatgccatacgggcgtgcctgaggtcaaaaacaaattaaaaagccctgtgaacacaataaatatcattatcggcttaagcccttttattaaatacttaggagacaattttgacacaaaaacacaaatccccaaaaataccgccaatgccaaatagccgtaaaaattctgaacgataaacaccaaaaccacatacgctatcattattaaaattttagttctcgggtccagcttgtggataaaagaattcccgggaaaatattgaccgagtgttatatcttttagcatttttccgcctttcaataaaactgtattaaatattttacttcaacataggagccagtactctgtatgcgtccccagtagtgtagatacctcccggaacgtcaatcccggcttctctgagcctatccatcaccctcgttatctgaggaacattaagcccaatctcctgaagtcttccgcttttgcagaacaccttatcaggggtatcaaacatctcaacatggccgccgttcataacaagaattctgtcggcaagttttgcaacatcctccatactgtgagacaccaaaagaaccgtcaaattcatcctcttgtgcatatctcttatcttaaacaatatctcatcccgtcctgccgggtccagcccagccgtcggctcgtctaaaatcaaaatcttaggctccattgccaaaaccccggcaatggctgctctgcgcttctgaccgccggacaaatcaaacggtgatttttcaagcagactgtcattaagccctaccatgtttgcggcaaatctagctctctcctcaacctcttcacgagggagacccatattagccgggccaaatgaaatatctttaagcaccgtttcttcaaaaagctgatactcaggatactgcataaccaatccgactttaaaccttatatcccgaagatttacgcctttatcattaatatctgttccatctataaaaactctgccctcagacggttttaacagcccgttcagcatttgtatcatagttgacttgcccgaacctgtatggcctataaccccaataaactcaccgggtttcacctccaggctcacattgtcaagcgcctttttttcaaatggaccgcccttcatatatgtatagcttacgttttcaagcttaatcattaatgcctgcctccgtataagaaaatcatatcaaattatcagcaattcttctttagtctctttattaattcttcagcgcactccttatcattaagaacgcgcggattaaagtcaagaccgagcttattgagcatatatatcaaatatgtggactgaggtgtatccagtcccaaatccaccaacctatctacctgcggaaaaatatctcggggagcgccttccatagaaatgtgtccgctgtcaacaactataaccctgtcggcctgaaccgcctcatccatataatgagtaatcagaataacagtcatgcccatttcccggttgagcttttttattgtttgtataacttccgctctgccgttcgggtcaagcattgccgtaggctcatccataaccaatatttcgggctgcatagccaaaactcccgcaatagcaaccctctgcttctgaccgccgctgagcatatgaggcgcatgccgcttaaacgcggtcattcctacagtttccagcgcattatcaacacgctctcttatctcctcgcgcggtacccctaaattctcaggagcaaacgcaacgtcctcttcaacaattgtggcaaccatttggttatcaggattttgaaacaccatcccgacccttctgcgtatatcaaaaagccggctttcatcagaagtatctatcccgtcaacaaataccttgccatcagttggaagcaaaatagcgttaaaatgttttgcaagcgttgacttaccggacccgttatgcccgagaaccgttaaaaattctccttctttaacgttcaggctcacattatcgagcacacggtttttctctccggtgtcctcgtccgtgtattcaaatattaagttgtcgacagttattatatcttccataaagagatacccctaaatacaattatcttttatcccagcgtgctgaatagccgcatggaagcacaagtccgccgtttgttacaggcagaccgatttcatctatatcaatttctccgccaaactttttgcagagcgtgagtttataaatattgctcattacattgcccgacattccggtagtatatgaattaaccaaaaaaaacaggggattgtcagacatgacatttaaacacgattcaataagaccaaaaagctcattttctattttccagacctcgccgcccgggcctctgccgtaagaaggcggatccataattataccgtcatatttgcggccgcgtctgacctcacgctccacaaacttctttacatcatcaacaatatatctgataggcctttcatcaagaccggataaaacagcgttttccttagcccaggtaaccatgccttttgccgcgtcaacgtgacaaacgctggctcctgcggcagacgccgccatagtagcgcctccggtatacgcgaaaagattcaaaacatttacctcatttttaggcctgccgctgtttttgattatatctgaaaaccagtcccagtttgcagcctgttccggaaaaagccccgtatgtttaaatcccataggctttattccgaatttgagttcacggtaacctatagtccaggacttcggcagttttttaaaagtcttccagctgccgcctccggtatggcttcggtcatacctggcgtccgccgctctccataactttgacttgtccgcctcgctcactgtccaaactatttgagggtcgggtcttagcagaataacatctccccagcgctccagcttttcgccgtcagacgcgtccaaaagttcataatctttccacttatcggataaaaacataaagatcctccgctgaattactaaacaagataaatttgggtaaatttgcccaataataatttaatgtatattttaacacgtattgtattgaaagtcaagggtgagagatttgtaaacatatttaaaaactgccgaaattaggcggatttttcatcaaattactgtgacaatacacttgacttttgataaaaataaaagtataatgtacaagctaaacagataagattttttgtttgaattgtttcagaacaaaatttttttacacagttaaaatccaaaagaggtgagaatatggctgacaaaaaaccggcggacagagtaatagcgcaaaacaaaaaagcttttcatgattactttgtagatgaagaattcgaggccggaattgaacttttgggaaccgaagtcaaatcggtgcgcgccggaaagattaacttaaaagacagctatgtttcactcaaaacaggcgaagccatattgataggcacacatataagcccatacgagcacggaaatatatttaacaaagaccccgaaagagcgcgcagactgcttctgcacaagcgtgagataaaccgtcttatcggtttaacccagcagcagggctacacgcttatacctctgagagtatattttaaaaaacagcttgttaaagtttcaataggtctgtgcagaggtaaaaagaattacgataagcgtgatgctatggcaaagcgtgacgctaaaagaaacatagaccgcgccattaagaattataaccatggataaaaccgcggagttaggagatatatcatgactataaaagacttacaaaccgaaatgattgccgcaatgaaggcaaaggagaagaacagaaaagacacaatctccgggctaattgccgccgttaaaaaggttgctattgacgagggatgccgggacgatattccggaatcaatggttgaaactgttattttaaaggagcttaaaaccgccaaggagcaagtggagacatgtcctgaggacagaaccgagctgctggctgaatataatgagaaagtaaatataatcagtgaattcgctccaaaacagttgtccgctgacgaaataaagacaattataaacgaaaaattctcagacgtactggcttccggcaacaagggcttgattatgaaatcggtaatgggcgagttaaaaggcaaagcagacggcaaattaataaaccaaattgtggctgagctctgcaaatagttgtattgattctatggaggaagaccaatgattatcaaaagttttgatatgtcggtggattatgctggactatcttcaaaccaacctaatgaaacggcaaaactaacctcatatattcttgaacctgagcttgtttcaaaaaccctatggaacaaacgcccggctgttattgtatgcgccggcggcggataccgctcaaggtcaagcagagaggcggagacgattgtgcttaaatactgcgccgccggatttcatggattccttctcgattactcaatagagcctacaggctggcctgctcctacatgcgagctttcaaaagccgtcaagaccgtaagggctatagctgatgaatattttatagacccggacaaaatttttgtatgcgggttttccgccggcggtcatctcgccgcttcactgggagtatattgggacttgcctatgatacagaaaggttcggaagcgacaggagaagaaaacaaaccgaacggtttgattttgtgctatccggttataatagaagacgacggaaaaacgcacgacggcaccaagcaaagatttacggagggcaaacctgaaaagcttgaatattttggtttggacaagcacgtaacctcaaacacgcctaaaagttttatatggcacacatttgaggatagttcggtgcctgtatacagttcgatgcggttcgcgtccgctctgctggaacacggagtagaatacgaacttcatatatacccaaagggaaaacacggactgtcgctcggcaataagctgaccggatgcgaggaaaagcattttgtacccggcgtaaccggatggatggagctttcaataaactggataaacagccagttataatatttacacatgggggtgtaatggtttcgacagggtcgtagaggcctgaggagcgagccgtggcgggcgccacgttaaaagcccaactttaaaattaaacgctaaaaataataacgtagctttagctgcctagttgcagcttgtccgcctgagtttaccgcagactcaggttagggcatcaatgatgcggtgaacgtgagccgggaaagctttgacccggccatgaattaatgaagctaccgagctatgcagtttgtcaatggactgcacagtgagggaattttaaccattgactacgctcgtagtgcctcttgaggatacttctttggacaggggttcaattcccctcacctccaccaagtaaaaaatccaaacccaattaaaacgggtttggatttttaatttatcagagcaaaatatcaaaaaggagagtaacaacacatctctaacgccgccatgttccttttttatttgtttaaagctattacttacccaagtatactttctacgtaatataataccatttttttaatattttaaaatatatcaagttaaaaactttccggaacaagtgcaagcttattgattgactcatgggctcttacaagcgaatcatatacggctaagacatcttctgaatcccaagtgcgcaatgatttttcatcaattacttcactgctttcgtttataattttactaagctgtgtctcatctgcgacagcaacaactgcctgtacagccgcgttactttgtgctttttttaagttcaatattaaactatcaatagaacctttggattgcacttcaaaaacatagatagctttacccatattgccaattttagcttcccataccacatcaacaatcgcaccggtagcaatctttacctctgaacggctttcaaatccaagaagttcgccgatagcaactaatttttccttaatctcatcatgcagagatttataatcattatcacttacagggcttggtttaactgaaatggagtcatttttcacctctttctgttcagcaagtggaagaatttcatcccacataaaataatcaacagccaaaaggtcataatcttctgcaccggattcttttaaaattctagcaatatcctttgcaattttacatacttccgcatatttttttccagtatactgatagttatatttcggcatatcaggtataccaagataagaaaaacaaagtatagtagttttattgaaaattatatactcatctggattgatatatgtaagtaattcgcttatcgtcgcgggtcctaatccttttatagactttaaaaacgaatcccatcttacttcaatttttgcagaaccaaataaaagctctgctaactctttttttaaggttttaaaaccattatcttcaattagcttatccacaacatattttttattaccccaaataagcatagaccaaagtttgcttatatattcgaaaaattcatcctctgtcatttgtaaaagtttttcttttgtgtatgactgataaaagttctttcgctctttacgctcagaccaattttcattatagtacgaagcattaatttttttattcttaatatactcatctaataatgactgtaattttaatttatccattttgcaacacaaatcctctctatgtaaaaatattttaaaacaattaataaattttactttgatattagtataataacacaaatagatttaattatcaatagtgtatcatctttaaatatatgtatgcgaaaaaataatttattttattaataccgaaatttaagaaagaaggactttaattttcaggaattagaaacttaattaagtacaaaccgacaatttttttatgattgcttttgataagaatctcatgttcataatagtagtcctctgcgctgtattctattcactaaagtattttttattatatatcaatttgtaattttaacttatttgttaaatattcatctaaatttattcaaaaaagttgtatatatgtaaatttcatgttataataaatttatattaactaatggggatgaaaccatgaaaaaaatattatccattgcattaatctttatattatcattttcttttcatttatatgctattgccgcggataactattccccggaatattcaatttgtcctttaatcgaacagattgataacagcttgatacgttcttctgatggaatgattgcttatttacaaaacggaaaatacggatatataaatgaaaccaacggagaaatattgcctgctcaatatgatcgtgcgtatgatttcaaaaatggacttgcacttgtgcgccaaggtgaatatatgggcgccattgataaagcgtctaatgtactcattcctttcgaatataattgtatatcctcatctattcttgttgatgaaacaattcccgcaagtaaaataattgacggagttgaaaaatggggaaagattgacatctccggtaatgtgattacaccatttcaatataattcgtacgatgagtgttgcagtgacaaaaatggtataggaatgaatatcattgttcaggaaaagaattctgaaaagcagtatagtttggttgatacaaatggaaatacaatagtgccttttgggagtaatgagattactaagaatcaagatagagaaggttttataataaaatatccaaaccccgatataagattaagctatttatatcaattctgcaatatagatgaaaatgggaaagcattgttttcagacatatatgattatatttatcctaacaacgacggagctttgggttctgatggaaataatcttatgctggttcgcaaagacgacaaattggggtatattgatctatacggaaaagttgctgttcctcttatatatgataaggcagaatttttttccgaaggtctctctgccgtcaaaaaagatggcaaatggggattcataaacacttacggagaaacagttatcaattttgaatacgattttgatttatacaataatagctattattgttcatggtatgcttgttttcaaaatggactttcgctggttcgaaaagatgagaagtttggaatcattaacaaaagtggagacattgtgatacctatagaatatgacgagataaaaaatgattataatttcaaatgtttaattgaaaacaacgttattccagtcaacgttggaggcctttggggattgacagatataaacggaactctgattactgaatgtttgttctcagagatacaggattttcatgaaggttatgcgtttataaaagaagacgttccaggtatcggagaacgttatggtattataaatacttcaggtgaaattactgcacgatatttaaatattactccagaatattattatagcgcattccacggtcaaaaaggatgggtaaaattccctcattatacctatttcaataacggcttgtctgcagttcaagcggacggaaaatggggatatattaatacttcaggcgaatttgtgatagagccgtggttggatacagctttaacagatacaactccatttacaaatggaggatatgattttaacaaattcggttatgccaaagtattttacaacgggggttggaatattatacatcgttatggatatcttacgttaaatgagtggtgggataaaattattgaaaacgacgactattttatttgtcaaggcgaaaaccgtgataaaataatatcttccagctgtgaatcagttttttatggtgagaacggagaattatataacgaagattctgagttaatactaaaatatgagccgaacagtattgttcatataggaggcaatatattcagctataggcatgaaggtataaccggtgtacttattgttaataaaacaaattaaagcatttgttaaacaatatcaccatgcataagtacaaagtttatataccagatattgcataattgtattttccgcaaattatttttaaatcggtaaaacacagaattatattatttcgccttacaatgaataattaaaaatatgatttaaaatagtattccaattataccgatatacaaaggagtttaagatgaacaagattgatttatccttgtttgaaactaaaggtgatttaatggaatatttcgataaaaattttgctaattcaaccaggttcaacagatatttttttgattactataataatgatgaaaattatttgggaataaatacgctaatttctttattaagaaaaaaagaattagaaatactagaatatgactatatctataataactcattacataacgaatcaaaatttttaaatccgctatgggaaaaagttaggcatcgatttactagaaaaggaatttatattacaccgcttcgtatgaatgtaattcactttattacagcatcagaaaatgtttttaatattgacaaattcaatgtagaagttgttgacagaaactcacttctttttgaagattttcgtactcttataattatgggaaatttaaattttaatgaattaatcagtcttatgcagaaatactataatcaagtcaactattttttatttttcccatacccaaaaaataacagcaatattaaccttgagattttgaatcttcagcatttctattcaatcacgcttacacatgaaggattgaaaagatgcagaaacgtaatagaagacagaataaaagaagccggggaaataatggatagattacttaattctaattcatgacaaatatacatttctatatatacaaatatatctaatataatttgttaaactaaaatccttacttttttagatagcgataacaaaaaggaaatgaaaaattatgaatcagataacattagattttaccgggtgcaagtcaccattaaaattacatttgattataaaagatacttttggatttcctgatttttatggaaataatctgtctgcgctatgggatagcttatgggaatattgtcctcctgacacagtcatttatgtgaaaggtgttaatactctgccaaaagattttgatgagtatatgagtaagatatttgatatattcaaaagattagaagatgaagatgaaaatataaaatttgaaattatgtcttaaatataaatataagaaataactagattaataaggtaacaaagtaaaaccacagttttagctgtggtttttattattttgatgtctcttttattacatatatcggcaatgttttatattttgttccatatgtgtcggtgaaataattttatcttaatatcagataaaagctaacaaataaatacagatatgttattatatattataagaaatatcttgggggataaatatatgaaaaaagaagtaggttttgaaaacagagaccgtttcgttgaattgggattgatgatttctgctttaagaaaagttaaaggttacacgcaatatgaactcgccgaaaaagctcatattagccgttctcatcttagctctattgaggctcctaatattacttcctctttttcattagaagtattctttaatatcgccgatattttagaggttaaacctggtgatttgctaaaccttaatttgccctcttcctattttaataatgatgaaaaagagaaaaaagcagaagattaataaatgaagtggtaaaatgtatttaaaaagattaagaactttgcgtttaagttcaggattaaaacaaacagatattgctgatattttaggaatacaacaaactgtatattcacgatatgaacgaggctttcaaactataccattacactttttagtaaaacttgcagatttttatcatacctcaaccgattacatattgaatcgaactaatgaaaaaaatccacgttaaaggaataatatataactaatataatgaacactacgtgttcagatgatagctcacctaacgcggcaaactacgtttgccctaccgatgttcgccgaagaccaacttttttgaacagttaaataaaataggaactcggaatatctattttcacggcagcttacaaagtcaacgggaaagttacagagctttttcttttgtgcgcagagcgcaaaagaaattagcgggggcgagcgccccttggagccgcaggcgacctaagcgagcaagcactttttctttggtgaagcgtttctttttcttgcgagaaaaagaaatggttcaaacaccattattatgtaataataaaattttttatatggggtcatatacatagtaaatatataatttataataataaactattaatcttggttattataaaacattatattaaacattaatacataagcccgccgatttttatataaaaccggcgggctttttacttttaatctagaattttattaaaattcgtccttagcttaaacggataccttagcttcatatggagtacccactaacggcgtcatattagttacatcatcccataccataactttcagatttccgttcgccgcaggagcatataccgccgtgtttgtctccggcgtcacacctgcactctttatgtcaatcaatacgccttcatcgttataaagcgcaaatataactgtcgcatttgcgcgtccgtcaaacacattcgaacttacggcggctgtgtaatttccttccgcttcagttacttctaatccgctgtctgcagatggcgttgcgctcggagcaacatccggtgttgcgcttgcatccgggtcaggattataattcggatttttaacctcatatactccgtgcaaagtctttacattcgctacccacttatctttaacatttccttctgtataaaatacagcataaaggtcgtgttttcctgtcacgccttcaggaacagtaatcttgcccaaatcctgcgcgctgtacccggttgctgtaaccatactatgtgcgatttcaggaccgtccttcgaatccagtcttatagaaacatatccgtcagtcttagcacgggtatccaattcaagcgaaagactcttaagtctatccatagtacagtccggataataatatccaacttcacctgctactccgccgtgagcgggataatatgtgttatatataaatcccacattgccgtttttctctatcctaggcaattgtgaatcgttgacagaattaaagaaccctttagtatccgtagctaaactatcccatgtcgcttctatatattccttttcggtctcgccgaagttgtcaattgtataagtcttaccagctgacgcgttaaatgaaagcaaagtctcgtcctgattaagtgttccggtcactacgttaccttcgccgtcctttataacagctgttcccatgtacttattgcggacttttaactctccgtctgttgctgcagtaacctttgcttcaacaggtttgccttcactccaagtcagatcaactgtagctccgccgagtgctttaagccccttaaagcttcctgcctgccaatctgaaggtattgccggaatgaggttgattgaaccatcatggctctgcataaccatctctgttataccgcttgccgcaccatagtttccgtctatttggaagttaggatgctggtcaaataagtttggtgatgtacgggttgtaaacaactgattaagcaatgtcgatgcaaattcgccgttaagcgcacgcgcatttaaattgattctccatgcgacaccccagccctgaccgctgccggctccgcgtccgctgacagaactctgatatgccttaaatatatcctgctcgctttcattttcgctgtaagcgctcaaatgcttgcccgggaacatctcccaaagctgtgaacaatgtctgtgtccgttattattgtttgcaatatgctcatttatgcttgttgacgcacctgtaaacgggttaattatattcttatattttccgcttccatcagcaaccgtcgagaagtcaaaagcaacatctccgcgtgcccactctttaataaggcctttttcgtcaataagattcggcgcaaccttacccggctcatctgccaaataacttgacggcatctgttctgctatcttagccagcaaatcagcgtcttctgtctctttgcccaaaactttagccgctttttgaacagtgtcgtaaaggtttctaaccaactgtgtatccattgccggtcccggctgaactccgccctgttcaggcgagcatgacgccgctgtaattaaatatccggttacagggtctttaaccaagtactttgtaaagaatgatgcagcacccttaatatatggataaacttctgccaaatactcggtatccaaattatactgataatactgccaagcatggtcaagcagccatactccaccggtaggccataagcctgctgttgcgttgtctataggcatagtaccgcgccacaagtcatagttatggtgcattacccatgggtctcccggctgatatgtgtcatcgcctcggtcgttatatataccgtactggtttgcggcagttatagaaccgccctgcgccaatgaggcaaaagtttctatcagcggcttttcattttcagccaaattgagcggctgtgccggccaatagttcatttcagtattaatatttatagtatactttccgccccacgaagcgcttctgcttgcgttccattttcccgcaagggtcagaggctgacttatttgtattggaatatctccggttgcggcattaccatcacgtcccggtctcgaacccgatatgagcagatactttccataattgaactccagtgctgccagctggttatcaccgtctccataagcgctgtatacgccgtttgcattagcctttgaaagtgagctgtctgctcctactttataaccgctgtcaccgtttacatcttttctgattctcttctctgtaggaacattagaattattaacgccttctttatttgcaagagataaagatgtgcgggtaaactgcccactgaaatcttcaaggtgtctgctctttattgtctgataatcttttgatttaacgttgcttacgtaaaccgcacagtcgtttgctggcttagcgttgtcaacattcagatagtccacataattcgaagctccgacaacatagattgtagctgtctttccgccgcttatattgattgttgtattatcatcagaaactgttaaaaccgctcccggctcgctgtccactatcatgtgagcttcaaaacgtataacgttaggaccgcccggctcattgctctttcctccgtctgtaacgcgcgcggtaagcttaagttcattatcgcttactttttcaaacttataggctgacgcgtcttgattatggtatgtatggaaagcagcgtcaaaattaaggtcgccgtctgattcgatatgcgtagccactgtttggtcaggatagctggcaaagctttctcttgtaaagtgattgccgttataatcatagtcaacagtaacggtaccggtttccatatccaaagcctttgtataattagttacgtcattatgactttgattaaagtcaagatatacttcaacaaacgacttgaaaactttctgtgattttggatttcccaggaatgttgattccaccatgcgctccatactgtatctgttttgaaccgcttcgttcgtagcagagttatcattgtttaaagcctgatttgagatactcttattggcaaacgccgggaagttagttctaaatgtttcatctccaacaacagcgtcagccgaacctatttctgccggatttccgtttacgtcagcgccgcggaaatatctccagccgccctctttgctgccgcttgtctggttaactgccgaaatatgctctgcattagcgatagcagtagtatccgtgtttgaattgttcgatacaatttcgccattctcattctgcaaatccgcatagggagaaccgctccaaatggtatcctcattgatttgaatgatttctttgtcgatagctccggctaccataccgcccattctgccgttgcctataggatatgcgtgagtccataggaattcagcatatgaccacttatctaacttttcacccggtttcgcatatggactttgaacttcgctcttgtccttattgctccagtttggatccatgcttgagtaattttcatccacattttcaaccatattatttgtccacattacagtttcagggtcaaagttctttgccgccgaaacatctgaggactgcgacagaaccacaccgccgaaagctgcagcggttaaactaacgcccaccgcaaaacttaacaatcttttccagacttttctcattttcttttcctcctatttattaggtaaacatattatacctcgaaaataatttattttatagaaccgctttaatgttgattttttggtaccaatttagtataatactattagttatatttttgtaaaaaaacttaaataaaaaagcaggataaatcattgttttggaggcaaattatggataaccttgaattctacgctgacccaaatgcaaaacttcctctttataagcagctctataaccatataaaagacggtattatctccggaaaaattaccggcggagaacggcttccgtcacgccgtaaattagcgcagaagcttaacataagcacaaataccgtgctcggcgcatatcagcttctcgaaagtgaaggttatattgtccccaaggcctcaagcggattttatgttaatcctgattataatctttttcaagactccgttcatctcgattgggagacgcagagcgatgcaaaatatatattcagccaaaacggtcttgaactctccaaaattccgaaaaaatctctcgccaggatttaccgcaacgccatatacgaccagccggacttattttctcacggagaaaagcccggagacccatgtttaagacaagcggttgcaaagtatttgtatgcggtcagaggtataaaatgcgacgaaaatcaaattattataggcgcgggaattgattacattcttacatgtctttgccgcgttctcggaaaagatacagtttggggattggaaaatccgtgctaccgccgctctttcagcagtattcaagacagcgtttcggaaataagattaataaatatagggtttaatggattcgatataaaaaatttattaaacagtgatattgacgtgctgtattttatgcctaatcatcagtttccggtcggccagattatcagtgaggatagacgccgtgaaattcttgactgggcaaagatgggcaaccattatatagttgaagacgattatgacggaagctttatataccaaaaaaacgcgcctagatctttattcactatggatgattccgagagagtaattctcatgggtgatttttcccgcagcctcgcccctggaataaaaattgcctatttagttatgccaaaaccgctgatagaaaaatggagccttaaacttccgttttataattgccttgcctcacgggcagaacaatttgctgtagcggagcttattaaagacggacacgctatcaaatatgttaattccttaagaaagatatacaaagaaaaacaagatattttgatatccgccctaaacaatcttccattcgcaaaccggttaacaatacatggagacaacggcggaacgcaccttttagtaacttttaaaactgaaaaaacagaacaggaactcaaaaaatcagcatataaggccggagtaaaaataatgccgctttcagccttcctttttaaacagtctgacaaactcccggataaaacattcatattcggttatggagaacttacaaacaacgagatagaagaaggaattgccgctctttcacatttgcttgattagaatatatattatcaacagtaaatagataaaattagtttggaaaatatttcttatcacaagtgtataacaaatattatattgtcaataataagtataggtgataatatgaataacaatgaggaaggagcaaaaaaaatgctggattataacaatattcctgttggtctgagcatggcgcttgcacagaacaccggagctcttgagcattttgcaaaaatgactgacgcggaaagacacagcgtaataaacaaagcccgctgtgttcagacaaaacatgaaatgcaggatttggttgccgggctgagcgacaatttttaagctaacttatattcgaaaatatccgaacatcatcacagcgtgttcggatatttttatgataaaaacacaaaaaatttcctgaaaaagtattgattttaatttcaatatatgctataattcattattgttgcagatacatataacaagataacggggtgtggctcagtttggtagagtacctgaatggggttcaggtggccgctggttcgaatccagtcactccgaccataccgagtgttcttacaggacttgaaaagttctgtaagaacactcggtttttaattttttgaatcaccagtctaatgaatatgcttcacaactactgtctgcaaatggcgagttccattcactttagctgacattcctgctgtgataactttatggaactgtcctataacaatttctgcaaacccatattatactgccaaatccattatacacctgattttatcaaataccactcttttcaaaaaatcaaccctatagtattaatattcacctttattatagcctttaattttttgtgaaacataattgaaagactaatcgttcttgtaatatttttttgttcatgtttcaataatattattataaatcttattgatttctttgttccttaactcctaaagaaattattttgtttaaagcttcttttggtatgtcgctttcaatgataatttctactcctacaactaaagttttgcttgtatttaccttaatgtaagttcccggctcataataatcttcggcatttccttttttcttaaacgatagttctttcctttctccattctggttatacccaataagattatattcttttcccttttcctgatttactccgtccttattgacaagccatgaatcttcatttacttcatctaacggaatctgtgtataaaaactatccgatgctacataacggtcattataatagcctttaaccataaacgccccgcacataactataacaatagtaactatgatagttattatttttttcatttcagctttcctcctaaaatttcaattcttttttctcaaaactgaataccgatattacgacaggtaacaccacatagacactcaatgctgcacacatcgtcgatatgtcccatgttccattctgcaaaaaggcgctgcgaatgctatatagctgagatgtataaaaatactttgtcatatctccaatcatatttacaaataattcttgtcctaaaatcatagtggcaagaagcattacagttcttgatgaaagcagaacgtatactattgtgccgttcactgcattttgtgtataaaaaaccggtatcgctgaaatacatatatatcccacagctcgtaatgcttcaactatcacgctaagaataagctctatgacctgcgcctgattcaaagcaagtcccaataccacaggagctaataatgttaaaataccaatacagaagatagacgcaaaaatcaacaaaatactttcaatgacctttgacagaacaactttatgtcgttgaagtccatatccaatcgccacctgaatggatttacttttgaaatcatcataaaacacagaaagaaatacagtcaaaccaacaaagagaggaaaaaaacctaaaaatattgtcgtttttgcaacataagcatccgccgtatatgtaggattaaaatatataaacatcattatacaaaacaacccaatatatattccgattgtcctaagaaacgattttttatgacaaatacgtttaatatccgctaaaacataattactcacatctttttcctcctaccaaatcaaaataataatcttccaaagatttataagccgaggattcctgcaaaacaggaatgttgttttgttttaaaacagaacgtgccttttccaaatctcctacataaatttgaaccgcgcttctttttactttcaaatcatcatgtgtaatttcctttaacacagttccctgatgaacaaacccaaatttatttgcggtatgttccaattcaccgagaatgtgagaagaaacaataatcgtcatattttgcttcctattcaagcttacaataagagtccttatatcagcaataccttgagggtcaagaccattaataggttcatctaacagcagaatttcagggcttccgagcagagcatttgcaattcccagtctttgcttcattcccatagaaaaagaaccgtatttagacgttacgccttccaatcccacaagatttaaaacacgttttacttcttctttgtctttaatatctttcaactgcctgtaatagtgcaaattttcttctgctgtcaggtaatcatagaaattatttcctataaaaaaacctatttttttacgtttctgcggcaattctgtttttttcttactgccggcaatacacagcgttccgctttcaaattcagttaatcctaaaataattttaaaaatcgttgtcttcccggcaccatttttcccaatcaaaccataaatctccccttttgctacatgaagattgacatccttcaaaactttaagattatcataattcttatatatttttgataatgtaatcatctttacctttctcctgtttatacatttttatattgttcttactttttttctttggaatttttttggcaaccagcatttgtacttcttaatagttcctcagaagatacgccatataattctgcaatagcaatcaagtttgaggtgcttggatcagatgttccgctttcccttagttaaagatatgaaccctatttatcagtctacttttccaataaatcggtagtatatctctatttcctgtattctttcgttctcctcattcgttgttgcctcatgaataaggattttttctatcattgcatttaataacggtgctgtcagttcctttggtacggaatactccttgattaactcaatccacttttcagcacctatcatatcctgttccattttacttaattcttctcttaggttggttatctgctgttctaattctatctgttccttttgatatttccccgacagcataatgaagtttcgttctgttatcttctcacaggctctatcttcatacattttcgcaaataaacggtcaatctcattttgtcggttctcggctttcttcaaggcactcgcctttttcttcttttcccgtattcgctctgcattgccgactttctgtattttgttcaataccttttcttcgtcctgctgtactgccttagcccaatactgcaagcgttccaatacagcttgatacagcacatcatagcggatatagtgcatagaacaataacctttgccaaactgtccgtagaaactacaagaataataactatatggtgttttattcgccttatttgtcgcaaacctcatagaccagccacaatccgcacacttgacaagccctgcaaatatcggcgttgccttttcctttgtctgtctacgccttgattttatctgctcctgcacacgatagaacacttccttgtcaataatcggttcatgcgtgttttctactcgaaaccattcgctttcgggctttcgtactttcttcttgcttttgaaagaaacggttgattgtctattatgaacgctgtttccgatatagacttcacttttcaatatcgcctttacatgagcaatcgtccactcataacgcttgctttcgggctttccctcaaagatatgagcaaaagtaccgtaccttgtaaaattcaaccaagacgctgtcgggactttttcttctcgcagtatttttgtgattttggcactaccgtaaccttgataggctagagagaagattttttcaacaatccattttgtttcctcatcaaccaacagtttccctttgatgtcggggtgtttcttatatcctaacggagcataagccccataatacgcaccctctgcaaatttcgtcttaaaggctgatttcactttacggctcgtatctcttgccacccattcattgatgatgttcttaaatggtgcaatctcactttcgcctttttcgctgtccacaccgtcgtcaatcgctatgtaacggacattatggctgggaaaatacaattctgtatattgtcctgtcataatataatttctaccaagtcgtgataagtcttttgttacaacacagttgatttttcctgcctctatatcctcaatcattctttgaaaactcggtctttcaaaatttgttcccgaccagccgtcatcaatatattcatcaatcacattcaaatgatgttcttttgcatatagacgcaacatacttctttgtgtggtaatgctggaactttcgccctgtaattcatcatctcggcttaacctaagataaagtgcagtattgtaaatctgttgtttcattgtcagttatcctcctttataactaacccgcgtttacaatacctgcttgcaagtaaagtataacacgggtactttttgtcattcaatctatttcttacaactgcaccgattttatgcgattgtctgctttgctttttccaacatgacatcagttagaagttcttccattgtctttcccttttcggagaaatgctcttttacaacaatctttgtctttcctctgttgccaatgccacacttgttatttttcttttgaattgtttttacagcattatcaataacacataccccctttctgtaaaatctttctaagcaattcaacggcttttgtcatagcccacaggacttccacctctgcatagttcttatgtagccgtacccattgcgtgcgacgcttttaacgctcaagctgtggctgtacgggagtatcattatctgacagcacaggtcatggcgataaaagaggacaaatcttttacaagaacacagataggttgtcgctcacttttgcaggagaaaggtcatggcgtatctgtttcaatggctcgctgtctgtcaaaggtattgaattgctttattcagttgtcaaagagcgattgaaagaagaaaatcatctttcctatatatcgcgttggaaaagagtaaaagcgtaaccaatattcaaaacttttttcttttcttgtaccatatagggaaagaaattgtcattctgctaagttgatgatgaaaagatttcttttcacaccctaactacctatgcaataccgttactgccaactatgaaatgaaagattttctttgctccatatagggaacgacaactaccaaatgttaagttgagaatgaaaatattttcttcttttcacatcaacactcaactgctaatacctgtttgaatacaaattgaagatactttttcttctttcacataacactgtccactcatcttgaatttccgacattttttcaaaacttttcttctttcactccatatagggaatggaaaccttgatttgatgacctattttcaaaaaaagttagatttccttttctcgtaccatatctgtacacaagttgatgttttgttgcagatattttgaagaaattaaaaaataccgtcattctcttgtgggacagcggtatctatgcgttcttctatggttgatttttctaattgtaataagtgtttatgcttatctttgagttctgcctgctcaatcatatctttcagtatcgttgtatgattttctctgtctaatgcttgtaccatttttatggttggtgcaacctgtctttgtaaccaatgcaacgctttttgtaaagtataaggttctggatttgtagttaatcgtatcggctctctattttcccctacaaaccatgcccaatcatcatttgttttccattgatttttgggtttatcatcttctctatctacaaagcggacataatgattgatgatagaaaaagcggtgcgttcagcgtcccgataggtcaataaatctacaactgcataataggctcgttcattcttcatgcgtatttcaaagcggttcttaatctccgtatcttcaacttctatgccattcttgacatactgctcataatttttctgataagcacacatatataattcactactggttgaaccgagatataaggtttctcctgtattctttggtaaatcgctaccacatttttccgtaccgctgtaatctttctgcatacggaagtaggagatacattcgcctgccttgtatttttcctttaattttggaatatctaatattcctgctttatcattgattgccaagtcaagccgtttcatcttaccacctgccgttaaacaatcaagcataaagtcataccatgagcgttcctgtgccaatagataactttccatttgccgacaccctctgccttttagttctaataaaacacctaaatgctcttgcatggaacacatgatgttgatgtcgcctaaaacatatttgctttcatatccgtacttgccaaaatcttcataaagcatataatcagattttaattgcaacacatcacgaataatctttaatgcgtccgtagtaggaaagcggacacgaaagtaatcaatcaataagaataatggttcttgtggattgaaacgctcaatctgtttttctaatgtttctttcaattcttccgtcaatggaaatttccctttttcaatgcggttataatactcacgactgataccacaggcaacagcaagtcttgtctgtgttactccgtattgttcacgcttttgtcttaattcttctataaagtatttatcattcattcttcaattcctccaatcaaaaaggcaactaccatatttgataattgcctatacttaaatttctgcaaaagaaaaagacaatcaatttcttatttgaaatcaactgtctttcctatgtcttattcaatttttcttagtgataatggcataatttatatcacaccatgtaaaatgcggttttgccttataaatacagcgttttccgcttagtagtgtctattgtctcttgttttttgtgccccccttgttagataacgggggcttactgttcgctcgcaagctcgctcaactgccgaagtgaaccagccactaaaaacggcggaaaaatctaagagattttcccaccgtcgtgtctggatcactccgcctgttatgttttttcgctttagcttttaaccccaagcatattatacctctaatgcacgaattagatttaccatttcaatagctccctgtgcacattcagagcctttatttcctgccttactgccagctcgttctatcgcctgttcaatcgtatctgtcgtaagaacaccaaacataactggtgtttcagtatttaaactgatttgagcaattccttttgatacctcactacacacataatcataatggcttgtactacctcgaataactgctcccaaacaaataatcgcatcatattttttactttttgccattttagacgctatcaaaggtatttcaaatgctcccggaacccaagctacctctatgtccttttcaccaacattttctcttttcaaattatctaatgcacctgctaatagcttagaagttataaactcattaaatcttgctacaacaataccgatttttatattttctgctactaaatttccttcaaaagtgttcatttatttttcctccatattcaaaatgtgtcccattcggtctttctttgtctttagataaaaactatcataaggatttgcttctatttcaatcggtactctgcttgaaattttcattccataatcttctaactgataaactttatcaggattatttgtaagtaaatgcaatgattttattcccaaatctcttaaaatctgtgcaccgatataatattctcttaaatcgccttgaaatcctaatgcaaggttggcgtcaagtgtatccataccgttatcctgtaaatgataggcttttagtttattgacaagcccgatacctcgtccctcttgtcgcatataaagcaatacaccagaaccattttctgcaatcattttcattgctttatctaactgctgtccacaatcacagcgtaaagagccaaagacatctcctgttaagcactctgagtggacacgacatagcacatcgtttccattattcaaatctcccataaccaatgcaacatgatgttctccattcaatttattgatataacaatgtgctttgaaattcccatattttgtaggcatttctacaactgaaacacattctacaagcatgtcatatacttttctgtattcctgtaattctttaattgtgagggttggtatatggtgtatttgggaaaattgaattaaatcagatgttctcatcattttcccgttttcattcataatttcgcaacataagccacattcttttaatcctgccaacctcaataagtcaatcgttgcttccgtatgtccgtttctttctaaaacacctccgttctttgcaatcagaggaaacatgtgccccggtctacgaaagtcaaagggatttacattctcagtcacacacatacgagccgttaatcctctttcttcggcagaaatacctgttgtagtatccttataatcaatagaaactgtaaaagcagtttcatggttatctgtattattttcaaccataggggaaagcataagcctgttagccagactttcactcataggcatacagattaagccttttgcataagtcgccataaaattaacattttctgttgtcgcaaattgtgccgaacaaattaaatccccctcattttctctctctttatcgtccataaccaaaacaagttttccctcttgtaacgcctgcaatgcctcttttattttttgatatttcataattcctttatcctttctgctaaaatccgtatcggcataacaactctttcgacaactctgtttcattgctgttgtctatgagtttctgcacatatttccctaatatatcattttcaaggtttaccatatccccgacttgtttattcttgagaattgtttgctccaaagtatgagggataacggataccgaaaaatctgctttcgatacttttgcgacagtaagactaataccgtcaatagcaatcgaacctttttcaacaattagatttaagatttctctttgcgtattgatttgataccacaccgcatttttgtctctacgcacagacgatattctacctgtcccatcaatatgccccgtaacaatgtgaccgcccaacctgccattcataggcatagctctttctaaattcacaaggcttccatgtcttaacaggctaagagccgttctgttccatgtttcattcatcacatcaactgtaaaagattgtcgagtgaaacaagtaactgtaaggcagataccattgactgctatgctgtcgcctaaatgtatatcctctaatatttttgaagctttaatggatagtttacagttacaagtatctttctgtattctttctactttaccgatttcttctattattcctgtaaacatggataaatcacttcgctttctatgaaataatcatttcccacttgagaaaaagcatatggtttaagcataatggcgtcattaggaaaagcaacaccttgaccacttacagggctttttgcactcccaccaaatattttaggtgctatataaatttgcacctcatcaacaatctgttgctcaagagcactccaattcaacgcacttccaccctctaaaagcagactgtctatctgcatatttcctaaacattgcattaaattcattaagtcaatatgattaccttttttcttcgtataaataatttcacaaccacattttctgtaaagagcaattttactttcatcaatagaagaagtagcgatatatgttttaatgtcattcgctgtttggataatttttgatgtaatgggtgttcttaaatctgtatcacatacgatacgaataggatttttcccgttttctaatcggcatgtcagtaaagggttatcttgaataacagtatttactcctaccatgattgcagtaaccttatgtctgaattggtgcacttgttttctcgctttttcgccacttatccattttgattgatttgtataagttgctattttcccgtccattgtcattgcatatttcataaaaacatacggaatacgctttgtaatatacttcctaaatactttgattaactgttgacattctatttctaaaatgcctacatcaacttgaatgttattttcctcaagttgctttacaccttttccagacacaatcggattacagtctaaagttccgacgactacccttgtaataccacttttaataattgtttctgtgcaaggtggtgtcttaccatagtgacagcatggttcaagtgttacataaagcgttgctcctacaggtgactctctgcaattttttagtgcatttctctctgcatgtaatccaccaaaaacttcatggtatccctgtcctataagccgattattttttacaattactgctccaaccataggattaggattgacatagccagcacccttttttgccagttctattgctattttcatgtattctatatcgctcatttttacacctccaaaaaaatacataccttgaataaaatctatccaagacatgcaaaagaggatttatgcgattaaagaaaatgctctgaaacaatataaaatcattccagagcacgcaaaaaagcataaacttacttttatcttctttcatccagactatactgtcggctttggaattacaccaaatcatgcctttcggctcgtgggctataccaccggtagggaattacaccctgccctgaagatagttattcaattacagacaattataatatctgatattatatctgtcaataaaaagtttttttctcgtttatccaaatacaataatttgcaagcaggtaaacacaggttatttcttaatatccttttgtttgggaaactccattttcccatttagaaactgcctgtctgctaactcctaatgtttctgatacaaattcctgcgtcattttacagcgaagtctgttttcctttagcacttctcccaaagattttcgtattgatttcttttcttctcttatttcttttgtattgatatattttttcagtgctctgacaaccaacacaaaaagataaacggctgctcccgcaactgctatccaaaaaaaacaatatagcagagcaactgttacagttaaaaatctagtcgtattcatttattctcctttcaatttgctttttgtgaaaaacatcgtttcatttgcttttctgtacatattctatcgaaaactcatggttgcttccaccaactattccgcaatttttagttgcatttgcagtttacatggtgtttcatggcttttacatagagttatttaataatttcttttaatccataaattattatacttcaatacaacaatctatacaagtgctccttccaataaaaactttcacactcgttttcttttattagttacacattgaacaaatcttaccgttataataattcaggtgagaccaaagcagttttctgtcgttaagcaaatatacatctttctctgttttggattcaggagatagctgttttgcatttttaatatttattttaaatacatttcctttcgtaatataacttgaatccttaataaaatatacaatggcaaatagagcaaaaactgcgtttcagagcgcaaaaatgctccgactttcttacgtcagagcattataaaaatatttaattttgaggttaatactgactactgataatcaaaaatctttattttactgagtttttaaataagttctataagaacaccagttcaccaaaatagaggttcctttttgaaaccaccttcttttgctgttagtttaatacagcaaaaatttttttgaagatataattaaaatgttactgttattttcgtaccttttgaaacctcactgttcatagttatttttccatgatgaattaaaacagtatgttttactatagacagtccaagtcctgtgccgccggtctcttttgaatgacttttatctactctgtaaaacctctcaaatactctgtcctgttcttcttttggtatgcctataccgttatcctccactgatataaattttttatctcctgatttacctactgttatctttacttttccgccctccttattatatctgatagagttatcgcaaagattaaatatcacctcatgaatcaggcgctcgtttccttcgatactttggctgctcccctcaagctcaagagtaatctcactctgttttgccttcatctccagctcgtttaatacgtccccggaaactttgtataaatccacatcactcatctcaatgccattaccctcgtcaaggcttgacaatcgtataatatcatctattaaagctaacaaacgttttgcttcagaatttatctgacctaaaaacctcggcatatcctcaggtttggctattccggctttcataatttcactgcatcccattatagaagtcagaggggtcttaagctcatgagaaacattagctgaaaattctcttcgcatttgttctgacgcttctttctcagtcacgtcgtgtataaacatcaaaacagcatatattttattgcttccattccccgcagaaaaatccttggcaacagatgatattgatattctgtatatacgttctccgcgttccagcgtaatatcccctgatattccatgaaacgccttttctacggcctccatatactttttatcacggcatatgcttaggtaatttatctttccgttattactgctgacattatcaaaatcaaatattttttttgccgccatattagccgaaataatatgtcggccgctgctaatgattattaatccgtcattcatatgctgcgttataaattcgttttctctctgagtgtcataaattgtgcttatctgctcaatcatttccttgttttgggtatcgatttttacaagtaaaggtgacagttcatcataagcctttgccgcggtgggattatctatatcaagctcattaatagggtttactatagtttttgtaaggaatccggcgactgacatagctatggcaagcaaaattataattgagaacaatattcccggcatagccttaaaaattactccaaacatactggatgtttcacatgcaacacgaagtatgtcgcctgaacttagtcttacggcgtagtaatatgtctttttaccgaatgtgtcagacgttctggtactctcgccgctccctttttcaagcgcgtcctgtacctcaggtctcccaatatggttttccatatcattaaagtcgctgtagttgtcatacttaaccgttccgtcagaacctataagggttatacggttctggcccctatttcccagccggcttatgtccatagtcacaggagaaatattctgaatttcacttatatattcagcttcgttttttatttgtgtttttgtttcatttgatagattgttatataaaagtccggcgactataactgttgtgaaaacaacacttattaacgttgttaatataattcctccaaaaattctgctgctcagtttcataatgacgccccctttctttcaaatacaatttactgtgccgcccaacagttaactcaatatatcattcctccgcccggtatcctacgccccgaatagtctttattatatttcctccgtgacccagtttttgacgaagggttcttatatgtacgtcgacagttctggtctcgccgtcaaaatcatatccccatatctgttcgagcagtatatccctggttattaccgttccttgatttttcataagcaggcgcaatacttcaaactcctttaacgtcagttcgacactatttccatcgacctcaacagagtgcttttttgtgttaagcgttatgcagccgatgttatatacacagtcgtctgagacagttccctcatgaccgcatcttcttaaaaccgctttaattctggagattaactccataattccaaacggttttgcaacataatcgtccgcgccgctgtctagaccgataaccttatcatactcggaatctttggcggtcagaagaataaccggcaagttcctggtcttgggattggcacgcagctttttaagtatactgactccgtcttcaccgggcagcattatatcaagcagcaccatatccggcagactgctctcatccaatccgtcaaaaaactgttttccattttcaaagcctttagccgaaaatcctgtattttcaaggctgtatacaaccaattcccgaatcccgctgtcatcctcaacacaataaatcattttttatcctcactattctctatgaactccggtgatagaaaattctacccactcagctatgtttaccgcgtggtccccaattctctccaaatactttgaagtcatcatcaaatcaagtgcagccgaagcattctggggattttcagttatatattttattaaatcattatttacttctataaataaatcatccacttcatcatctctgtttattacatcctgggctaactccagattgcttccgacaaatgcgtcaacgctctcagttaccattttggaaaccgctttagtcatttttttaatatgcgcgctgttatatccgtccattaattcggtgtggattactatctcggctatatctgccgcctggtctccgatacgttccatatccgtaatcattttcaaggccgcggaaatcaatctcaggtcacttgccacaggctgctgctgaagcaggagcttcaaacacaaaccttcaatatccttttctatctgattaatctcttcctcgatagacagagtttcatcagctgtttccttatcatgatttaacaaagcccgtatcgcgcaatcaatcgcattttcacacagagcacccatctcaatcagctctctgtttagtttgtcaagctgtctgtcaaatttgcttctcatagtatcaaccaaaccttcccgtaatatagtcttctgttctcttatccttaggaattgagaatatctgttcagtatctccgaactcaacaacttcacccaaaagaaaaaatgcggtcttatctgatatacgcgttgcctgctgcatactatgggtcactatgacgatagtataacgcttttttaattcaagcgcaaggtcttctatttttgaagttgaaatcgggtcgagagccgacgttggctcgtccataagcaacacctccggttcaacagccagcgccctcgctatacacaatctctgctgctgtcctcctgacagaccaagcgcgcttttctttaatctatcttttacttcattccatatagcggcgcgctcaagcgacttttggactatctcgtcaagcttagcctttgattttatcccatgcgttctaggaccatacgctatattgtcataaatactcatcggaaaaggattaggcttttgaaaaaccattcccacccgtttgcggagcaaattagtatccatgtccttatatatatttataccgtcaagttttacctctccgtctattctgcagccctcaaccaaatcattcattctgttaagggttttaagtaatgttgatttgccgcagcccgaaggaccgataaatgcggttatttcatttttaggtatttccatgtttacactttttaaagcatgaaaatccccgtaatgaagatttaaatctttaatggatatcacactcataactttttatccttatacttaaatttggattttgctggaatccataaacccaatattatttactggaaattttcttagccaatgccgatgaagccgcgttcagtatcactactataataagcagcacaacggctgtagcgtaggattgattagtgttcagcccctcactccacagagcgtacatatgtacagcgagggttcttccagaaccgaacaaaccgctcggaatctgagctaccgttcctgctgtataaattaaagccgcagtctctcccacaattctgccgacagataaaacaactccggccaaaatccccggcaccgctgacggaagaactattttaaacactgttctgagcttcccggctcctaagccaaagctgccttcacggaaagtatccggaacagctttaagagcttcctcagtggttctcattatgacgggcagtatcataataaccaaagtaaacgctcccgcaagcagggaatatccccacgaaaatgctgtgacaaacaaaaggaatccgaacaatccataaactatggacggtattcccgaaagggtctccgcagtcagtctgataaggccaactattttgtttcctctctttgcatactcaacaagatatatagcagaaaacactcccaaaggcaccgctataaccaatgacagagccgtcataacaactgtgtttatcaaggccggaaaaagcgagacattttcagagttgtattcaaaactgaaaaggtctagcgacaagtttggaattccctttatcaatatataagcaataagacaaataagaacgccgaatgttataaacgccgctgtatatacaagagttcttaaaatcactgactgtagctttgatttattcattccgctgcgcctcccggcaaatctttgttccgccgctgcctcgcctgacggtctcaaaattattctcatttattttccgacctccttttcaaaactgaaaaagagacgtttatgattaggataaacacaaacagcaccaccgcggtagctataagggcctctctgtgcaaatctgcggcatatcccatttctaaaacaatgtttgcagtcatggttcttacgccgctgaacaatcctctcggcagagccgcctggtttcccgcaaccataataaccgccatagtctctccgatagcacgcccgacgccaagtatcacgccggccataactcccgaagcagcagccggcagaactaccctaaatacgcttctctcgtgacttgccccaagcgccagcgaaccttcataataactttcaggcaccgctcttatcgctgattcgctgacggatattatagtcggcagtatcattattcccaacacaattgacgcggctaacatactcgttccgctcccgccgaacaaatcacgaatcagcggaactattaccataagcccaaaaaatccgtacacaaccgatgggattcccgcaagcaaatcaacagccggtttaagtattttatacagccatttcggacaaaacctcgtcatgaaaacggctacaagaatgcctatcggaacgcctaataaaatggctccggcagtaacatatatacttcccaatatcatcggcagtattccgtatatattattattcggcttccactgtcttcccatcagaaagtcaaacagaccgatttctttcatagccggtatgccgttcgcaaataaaaatacgcaaatcagaagaactgccaatattgatacgcacgcacagaataaaaacacgccgtgcataaatttttctttaaatttcgtcataataaataccccattatatgattggtattaatgaatatcatcccaaccggttgtctctccggtataaatctgtttaacctgctccgatgtaatattatttaaaggattttcattgttaactataaccgctataccgtccagagctattaccgttgcacttgcgcccttttccttttcgctgtccttaagctcacggcttgccattcctatatcacatactcctgacaaagcgttggtcactcccgttgttgagtcactctgctgtatttcaatttcagcgtttggatttaattcggaatatgcttccttcaacttttccataaccggcgtaactgaagatgatcccgatacgacaattttgcctgacggttttgtgcccgcataatttccggtgttcgcttctgaaatataatgattgtcttcaaccactttttgtccttcttggctctggataaactttataaagtctcctgtcacttccgaaacgttatcttttgtcactatattaaatggacgtgaaaccttatacgtgccgttctttatattttcagccgtcgcttcagcgccgtccacgttcagcgctttaacgctgccattaagcgaacccagcgaaatataacctattgctctcacattgcctgatacacttgtcatcattacagaggtgctgtttgttatatctgctgtatccacagtcatgtccatcttttcaccgttagttgtctcctctattccaaaaagttcaataaacgctcctcttgttcccgaaccgtcttctcttgaaataaccgtaatatttccgcctttgccggcggtatcagaaccgcatgaagttaaagccatacatcccaacactaaaaccgatacagccgccgctaagataaaccctcttttaattttcatctttttctctccttttaattgttttaaatcaactgatttgataataccgctgattctgttagcaaattctgcatttcttaacatatttatattattaccctaatgttaaatccaaaatcatgctaatgttaaatttaggttaactatttttattgttgtcccttaatttaaaaatattataaggttttaatactccaatctaactctttcagcagtattttacacagttggtttgtataattaagtcgctttttgtaaaaaggtttaaggcaaattttattgacaataggaatattttaagctacaataatcattgtgttgcaatatagtaacatatctgtaatattttggaaggagaatcctcattatgtttgggcaggatattggaatagatttaggaacgtctaccgttcttgtttatgtgaaaggcagaggaataatagaccgggagccatgcgttgtggcggtggactccggcacggacaggataatagcggtcggtgctgaagctcaaaaaatgctgggtcgcacacccggaaacatcatagcggtaaaacctcttaaagacggtgttatttctgactattcgacagctgaaagaatgctcaagcattttgttcaaaaatcgtcgggacacagttttatcggagcgtttataaaaccgagaatggttgtcagcgtcccaagcaatataacggaggttgaagaacgcgctgttattgacgccggaattcaggcgggcgccggaagggtcagcctggttgaagaacctttggcggcggctttgggagttgggataaacgttgaggaagcaaaaggaaacgttgtcgtggatataggcggcggaacctgcgatattgccgttatatctctcggcggaatagtgataagcagttctattaaaacagccggagacagttttgacgacgctataataagatatatcaggaaaaaatataacgttctgataggtgaaagaaccgcagaacaattaaagataaaaatcggctgcgtctataaaagagacaagcttttagcaatggaagcacgcggaagaagtttggtttcaggtctgccaaagacaattcaggtctcaagcgatgaaattttagacgcgcttaaggaatccgccggagctatagttgacgccatcagaacgcttcttgaaaaaactccgcctgaacttatcggtgatatttgcagaaacggtattgtactcacaggcggatgctctaaaatttacggtattaccaaccttatctggcgtgagctcaatatgaaggccaaagtcgcagacgaccctgaaacctgtgttgtaaccggtctcggaaaagccatggatcacccggagctgttaaaacgaaaataaaatcttacttagaaaatacctgcacaattttataaacggcaggttaaatgttaaacctttggcaattataaaaaatagaatttgttttaaatcctaattataaaaacagatcagcaaaataaagtttaaattaaaaaaggaatgcggctaaaccgcattccttttatatattttcttaaaattacttgttgttaacaagatcctttaacgcacggccagccttaaaagccggaacctttgcagcaggaatattcatttcttcacctgtgagagggttctttcctgttctggcagctctgtctctaacttcaaaacttccaaatccgattaactgaactttttcacccttcttgagagtatcctgaactgtttcaataaaagctgcgagtgctgcctctgaatccttctttgtcaaacctgatttttcagccatagctgaaagtaattcttgcttattcattttttgtcctcctaaaaaaatatataaaataattattttttcaaagctttaagtagggttaatatctgcatgtctgtttcaggttaacgtcttagaatgaccgtttgccacaacaatatagttatagcctataagcactgcaaatactcccatccccttaatccaccaatacgtatttattttactacaaataactgcaaatttccacactatttttttgatttataaaatatttgtataaataaacaaatttttgagccttttgagccctgaaaacatgaatttatagtaacttttcaccaaaaaaaggaagatatttttttgttccaatccaattttgagttcagtccacgttttcacggcttgctttatatcgtcattttgatgaatttataagatttttcacttaaaatcatttttagcaattctttgacaaatattcaactctatgatataatatcttattaaaaaaacgacaattaatttttaatttattatctaacaaaattgccgtaatatatggataaaatatcagctcatatattgttatataagacgcgtgatattatacattttttaccggcaaacttaaaatcttaaacttacttaccgtactattcacaatattaattttataggaggatataaatatggcttattattacaaagaaccatctcacacatttagtgaatacttgcttgtaccgggttactctgattctaactgcattcccggcaacgtctctttaaaaacaccgctcgtaaaatataaaaaaggtgaggaacccgcattatctatgaacactccgcttgtgtccgccataatgcagtcggtttcaggcgttgatatggctattgccctcgccagagagggaggcgtatcctttatttacggctcacagcctatagaaaagcaggcggaaatgattaggaaagttaaggcatacaaggccggttttgttgagtcagactcaaatataagcccggacaagaccttagccgatattcttgcattaaaggctgaaagaggccactccacaatagctgtcacagaagacggaacacaaaacggcaagcttgtgggtatagtaaccagccgtgattacagggtcagccgtatgtcgcctgatgaaaaaatctcaacttttatgaccccgtttgacaagctcatcacagctcctgagggcacaactctaaaagaagccaacgacatattatgggaacataagctcaattcactgcccattgttaacgatgacggaagactagtggcatttgtattccgaaaggattacgaacagcacaaagagaatcctcttgaactgcttgattcacataagagatacgtggttggagcaggtataaacacgagagattacgaggagcgtgtgccggctctcgtagaggcaggtgtagatattctctgcatagactccagtgagggttatacggaatggcagtcgagagttataaaattcatacgtgaaaaatacggcgacacagttaaagtcggagccggcaacatagtagacagagagggatttagattcttagctgaggcaggcgcagactttataaagataggaataggcggcggaagtatttgtatcacccgtgaaaccaaaggtataggacgcggacaggctacttctgtcatagaggtagcagaggcaagagacgaatatttcaaagaaaccggagtatatattccgatatgttctgacggcggtattgttcttgactatcatataacattagcgctcgctatgggctgcgacttctgtatgctaggcagatactttgccagatttgacgaaagcccgaccaataaagttatggtcaacggcagttacatgaaggaatactggggtgagggaagcgcaagagcgggaaactggcagaggtacgacctcggcggcgcggcaaagctctcgtttgtagagggagtggactgttacgttccatatgccggctcactgcatgataatctaacaaccaccctgagcaaggttcgctcaaccatgtgcaactgcggagctacgaatatttctgaattccagaataaagcaaaactgacattggtaagcagtgtatcgattattgagggcggagcccatgacgttgtagtgaaggataatgtaaatcatgagtaataaaaatatccctgtctaaactagacagggatatttttgtgtccaaaaattgcaggtcttatatgctcaaattaactttatttataattccatttaatatttattattttatctactgaaataattatctatatactttgtatatgaccccatataaaaaaatttattattacataatagggtgtttgaaccatttctttttatttgagtattcatattattgacattgcaggttatggaaaaataagaacatatgtataatacacactttcaaggaaagtgtggtcacactcgtaagaaaaagaaacgcttcacctgtgaccacacctgaaaggtgtgtgtaataaaaagttacttgttttaaataacctacaatgtcattattatgaatactcaaataaaagaaaaagtactgctcgcttaggtcgcctatcggctccaaagggcgctcgcccccgctaatttcatcatgaagcatgcttcatgatgaaaaaagccctactattttcccgttgactttgtaacctaccgtgaaaagagatattccgagttcctattaatttactcattaaaaaagtcaagttttcaatctagattaataaacaaaaaagcaggtttttcagcgaacttcggaagggcgcatttatgcgcctcgttaggtgagctatcatctgaatacgcagtattcaatatacgttttgactttataatataaatttataatcttaccaattctactggttaaatttatataaattcaaactataatcggttagatttttgtttttatatgctataatataattatatatatttgattatatatatgaatttataaaataaaaggagaatacttatgaaaaaagaagtaggctttgaaaacagagaccgttttgttgagttaggcttgatgatttctgctttaagaaaagctaaaggctatactcaatatgaacttgcagagaaggctcatattagtcggtcccatcttagttctattgaagctcctaatatatcttcttccttctctttagaagttttctttaatattgcagatattttagaggttaaacccggcgacttacttaatcttaacctgccttcttcttattttaatgaagatgaaaaacagaaaaaattagaagataagtaaaggaagtgataaaatgtatttgaaaaggttaagaactctacgcttaagcgcagggttaaaacaaacagaaattgctgaaatgttaggaatacaacaaaccgtgtattcacgatatgagagaggttttcaaactatacctctacattttctagtgaaacttgccgacttttacaatacctcaaccgattacttattaaatcgcactaataaaaagaatccatattaaagtaataatatttataaatataaggaacactacgtgttcagatgatagttcacctaacgcggcgcataaatgcgcccttccgatgttcactaaaaaaccgacttttttagttaattaaatcaatattaactcggaatatcttttttcacggcagttcacaaagtcaacgggaaagttacaaggctttttcttttgtgcgtgaagcgcaaaagaaattagcgggggcgagcgccccttggagccgcaggcgacctaagcgagcattaaaggtgcataaccgtaactacaataaattcccgatgcgtccgcttaattggaaagctccaattgactacatcaactcttttatcaatttcggcgaaatcttttaatcttttttgtaacacatcattgacaaacctacaaaattttctttttatttttgagctaaataactatatatttttatatcttattttattccttttacatatatcgtcacatgcttttttgcattatgtttttataagattagatatatataacaattgtaacaccattaaacaaacattaatatataaaaacaattggaataataagataagatgctgtcttaggacatatcataatataaagaaatatgaagctatttaagaatagccaatttgactttactgcaaaatattcgcgtcctacagaatacaactcaccctttcataatccaattatctccttcttttattactgtagccgattgacataaaggctgcatagtatttaaaccgctccaccacataaccttaattatttttgcaccgattgcctgaacatcaaaattaacatcataaacattgcggctttctgtctcagccgcaggttgactcattgtaagcagtctgccatttgcatcgtatactgctgcaaacagaatctccccttcaaatataggaccatttagttcgattataatattattatcagctacaccaacactttgtattttctgttgaaccgtagttacagaaacttccttatccatcttcgtacggtccatttcaagaacaagaatccaagaagttgcgtcgggtgttgtaagaggccacctaggtatagttacttcaacatcaattgctccggttgtttcactgagcgacgttatctccaacttaggcgaaccgccggttatggtcacaagagtaaaatagagtaacttatcctcaaaaaaagaggcgtcatatttattcctatcaaaataaagcggtatattgttatagtgatattcgttaatataattatcaagttcttccacagaaaaaactttcaccgcttgcggacggctgtgatcattcacccctactataagtgaagcgttaatctcatcggcggttaattcattaaaatcaattgtttcatctttcgcacttacataaaatcccgaaaatactgttgcaaacataaaaattgcagcacaaaaacttataaatcgtttattcattacttaaccccctacatacagtattaaattttaatcacaaaactcattttttatgtaaagcaaattttatttctagtacattatcactccccacctttcatacaccccattaacgattttaaacaaaatttatctcaaaatccttaaaacttacaatattactttgttatatcttacatcttcattaaatagaacgttttattattatagtttttgagcatttctaattaaagagttcttaaatttaattatatatattatataattataaaaatactttttatttcgcattatattaataatataacataatatctttattttttcaacgatacaaataatatagatgttttttctatataaccgacaaacattattaaatatttttagcaattattactaacacaaaatatatttaatagtatacgaaattttaaataatatattatattactcaaatagaattattttttctaattatagtcatttcttcacaacaatttttaaagcaaaataatgattatcatatattaatagcaaaagcataacagcattaatcatataacatttgtttgattgatataatctgctgttaatatttttatttatataatacatatatttttctataagatttttcttccgataaaacaaaaagttcagttacaattccaaagacttgccccttcttcttctatcttgctttttatttttgattttctgtataatatgtatagtgaacacaaaaaatttatttttgaaatataaatattatttacatttaattcctgtctatatattatgtctttttagtatattgtccctttattttacaaataatattgttacaaaatttgttagcttatgttttgacaaatttagtgctgtatggcaattacaataaaatataaaaaggagcgttaatatatgaaagcaaccggaatagtcagacgaattgatgacttgggacgtatcgttataccaaaagaaataagaagaactttaagaattcacgagggcgaccctcttgaaatatacacagacagtgacgggatggttatatttaaaaaatattcacctatcggagaactcagcgaatttgctcatcaatatgccgacacattaaacaagtctacaggtttactcacctgcatcacagacaaagacagtgtaatcgctgccagcggaaacggcaaaaaggaacttaaagagaaaaaggtttccggtgaagttgaaaaaataatggaaaagaaaacaatgttctattccaagcaaaatgagaacactatcaaaatcattgatgacagcgacaaatacaaagcaggagttgtagctcctatcgtacacgacggcgaccccgtcggaacagttatattcatagccgagcctgaaaagagtatgaacgaagttgagcagaaattagcggaaacagctgcaggatttttaagcaaggctctggaataaaagacatagaatacgcccacggctttaggctatgggcgtatgtttttatacaaaatccgacagtattatatttgacacatatatataatcagattttatttttattatgtccccgtactcttccattgttttgagcaggtttatatgcttattcagctgttttccgaaaacatcaaaaatatcttttccaaacatattcataaactttttttttgaaattccacggtcaagtctcagacccaaaaacacaaattcacacattcggtcatattcagcagttttatcaatctctataattccacttccgctgttatttacacgatctatatatccgctgacacttctttcgttgttaaaacggaacttccctatacatgaatacgctcccgctccaaatccaatataatcatctaaattccagtataaaagattgtgacgtgattcataccccggctttgcaaaattcgatatctcatatctgttatacccattattatcgagataatttacgcagaagtcatacatctccctatttttatcatcatcgggcaagtctaaatttccgtcgttaaaaagtctccaaaagggcgttccctcttcaatctttaatgaataagccgaaatatgttcaggctccagctctgccgtcttttccaaagtctctttccataagtccaacgactggttcggcaatccaaacatcaaatctacagaaatattttcaaacccggaattcctggcacttttaaaacattccaaaaaatcattatagttatgtaccctgcctaaactttttaacatatcgtcatctgacgactgcatacctatgcttaagcggtttataccgcatcttctcagcctgctgagtttttcaaagtccgctgttccgggattgcactctatagtaatctcggcgtcctcttcaatcgaaaaattatttttaacagcctcaacaatcttctctgtcagcgcggtatcaatatatgtcggagttcctcctcctatatatattgagctgagtttagtatcaggcaattttaattttgccgtttcgatttcctttatcaaagcatccgcatatgaataactcatatccgtcattcccgaatatgagttaaaatcgcagtatttacatttttgtttgcaaaaaggtatatgaatatatgctccggtcataatttaatctccaaaattattcatcaagcttcaatacggacatgaatgcttcctgcggcacttctacgcttcctacctggcgcatacgctttttaccctccttctgcttttcaagcagcttacgttttctggatatgtctccgccgtaacactttgccaaaacgtctttgcgcatcgccttaaccgtctcgcgggcaataatctttcctccgacagcggcttgtatcggcacttcaaacaactgtctcggaataacctcttttaacttttcagccattcttctgcccctggaataagctctgtccgaatgaacaataaacgacagtgcgtcaaccatttcaccattaagcagcatatccagtttaaccaggtctgacctctcatatctttcaaactcataatcaaacgaagcgtatcctctggttctggatttcagcgcgtcaaagaagtcatatataatctcgttcagcggcagaaaatagttgagctgaaccctggtttcatcaagatattccatatctatataggttccccgcctgtcctgacagagctccattatactgccgacatattcctttggcaacagaatcgaagccctgactatcggctcctccatataatcaatttctgaaacgtccggcagatttgttgggttgtctatagttaaaattgttccgtccgtttttattaccttatactcaaccgacggcgcggttgttaccaaatcaaggttaaattcgcgctctaacctttcctggattatttccatatgcagcagcccaagaaatccgcacctgaatccaaatcccagagccaccgaagtttccgcctcaaaattaagcgccgcgtcgtttagctgaagtttttccaacgcctcgcggaggtcgtcgtatcttgctccgtcagccggatatataccgctgtataccatagacttaacttccttataacccggcagagcttcctcagcgccgttttcagaagttgtcaccgtgtcgccgacatgaacatcctgcacgtttttaatgctggcggtaataaatccaacctcacccgcagaaatttcatcagctgaaaccaaaccgttaggatgcagataacctacgtctacaacatcaaactcactgcctgtcgccatcatttttattctctgaccggattttagcttgccgtctataatcctaacataaacaataacacccttatacgcgtcataataagagtcaaaaataagcgctttcagcggtgcgtcttcatctccggccggtggagggataagctcaacaatcttttcaagaacctcttcaatattgattccgtttttagctgatattaaaggcgcattttctccatctatgcctataacatcctctatctcctgcttcacctcgtccggtcttgcgctgggaaggtcaattttatttataacaggtacgatttcgaggtcatgctccatagctagataagtgtttgccaaagtctgcgcctcaataccctgggcggcgtccactaccaaaacagcgccctcacacgcagccaaggaacgagacacttcatagttaaaatcaacgtgtcccggagtgtctattaaattaagctcatactcttttccgtctttagctttataaatcaatttcacggcacgcgcttttatggtaatcccgcgctcacgctccaattccatattgtcaagtatctgcgcctgcatctcacgctgggttaaagccccggtaaactccaaaagcctgtctgccaaggtgctttttccgtggtcaatatgagcgattattgaaaaatttcttatattatcctggcgattcattagttttcctccaagtcggttaatcaatataaacgaacatgactgttctactgacataatattctaacataaaccgccccaaatatcaacatcaaatttgcctataatctatctgtatctgtctacatccttgagtgttattccatcatttacggcaatatttatcccatttgccaccactgaagatatatcgtcaattatagtgtcaacatctttcggcgcaactataaagcttccgaactttggttttataacctcttttataagctcatacttttcgtcagccatttcaccgattagctttaaagtctgtcttgtcggcaaatctttcaaaactcctgccttgccctggctggcagcattaaccagcatgtccagcgtatctccggcaattgtagcagcgtctacaaccgtgggtactccgattgcaattacaggcgttcccaaagtgtcaatatttaagcccttgcgcttatttccaaccccctcaccgggagttataccggtatcagatatctgtatagttgtgttgacgcgctccatttttcttgagcagagagcgtctatagcaataacaagtttgggttttatcctgtcaaccagaccccttattatctctccggtttcaataccggtcagtcccaacactcccggcacaatgccgcagattgagcgcacaccgttctgaatctcgtcagggacatactcttttagatgcctggttatcattaatgacgatatgaccttgggtccaagtgcgtccgcagtgatattctgatttcccaaacctacaaccaaaatcacatcatcgtcttttgttataaacttatcagtcaggcttttcagttcctcagcgcatacctggcacattttttcatatattttctgttctccatagaacctgctgggcatttcaatcgttatatagtcacccttaggctttcctaggttttcttctccctcttcatttaatatttttacgcgagtgacttttattatattttcaatagaatattcatcaacggatataccaccgacctcatcagctttttctgccgtttcggaatataattctttcgcttccagcgctaagtcgcatctaacttgttctgccattttatcacctcataaaattttatatagatatattttttcgtttatcttaatttatatactataagattatttataaaaacacacggcgctgagaattgaaactgtttttggattaataaaaaaatttaaaataattttaaaaaaagtcttgcattatggaaaatataatgttataatacgtaatactgatgtaaaaatcaaatcgttattgtttggaggtgaaattatgcctaacattaaatcagctaagaaaagagttaaagttattaagaaaaagactcttcaaaatcagattattaagtctcagctaaagaccgctatcaagaagtttgaagcttctttaaagcaaggacaggcagctgcctccgatgcttacaaggttgttgttaagaagacagatcaggctgttgcgaaaggtattcttcataagaacactgcttctcgcagaaagagccagtattcaaatatgcttaacaaaatcgcgtagcataatcaagatataacaggcggtatgcctgcaataaattgaatccatggttgcttaggcaacatctaacacttggaatcattaaaattctacaaatgatcggagccggacgcggctccttttttatttttaagttgacataagtcatattatatgttacaatacgttcagattttaagattggagttgaaagaatgcgtaatttttcttgctgatattttggcataacagaattatggaagcggatccttccgcctgtttgttatgcccgcgcaggaaagttaccaattcatacaactcaaaatgtttttatatatttaacctttttcattattatgaaattttttgagctgccgggatttactttcttgcagctttcataattttggaggaggtctttttatgtcccaaattaatatttcaaacctgacgtttgcctatgaaggcagctatgacaatatttttgaaaacgcgtcttttcagattgacaccgattggaaaaccggatttatcggcagaaacggccgcggaaaaacaacgtttttgaaccttctaatgagtaaatataaatacagcggaaccatttcatcatctgcaggctttgaatactttccgtttgatattcctgatgacaatgttgacacaattgatattgctgaatttattttcagtgattttgaatattggaaactttcccgtgaaataaacttgctcggcatgagcgatgatattttatatcgtcctttttccaccctttccggcggtgaaaaaacaaagtttcaattggcagttttatttttgaaagaaagtaaatttctgcttatagacgaaccaacaaatcatcttgacgctgagggacgtgaaacagtcgcaaaatacctcggtcagaaaaaggggtttatccttgtttcacatgacagagcctttcttgacaagtgtgtagaccacataatctcaataaacaaaacaaacatagaaatacaaaaaggaaatttttcatcatggcttttaaacaaagaacagcgtgataatttcgaactgaccaaaaatgaaaagctaaagaaagatataaaacggctttcacagtcagcgcagagaaccgccaaatggtcagacaaagtagaaaaaacaaaatgcggaaccaaaaattcaggtctcagacccgaccgaggttttataggccacaagtccgcaaagatgatgaagcgttcaaagtctatagtttcaaggaaagagtcggccatcgaagagaaatccggcctgttaaaaaatatcgaaacaactgactcgcttaaaatacaccaagtcccatttaaaacaaaacaattgattcatatggaagatgtatctataaaatatgacgcaaacataatttgcgataatataaacctggatgttctgcaaggtgacagagttgcaatagagggtaaaaacggctctggaaaatccagtatactcaaactgatttgcggtgaaaaaattgagcatggcggcactgttcaaataggaagcggtttaatcgtttcatatcttcctcaggatgtctcttttctttcgggcagcttaaagaaatattccatagagaaaaatttagatgagacattatttaaaaccattctcagaaagcttgatttttcacggacacaatttgaaaaagatatgaacaactatagtctcggtcaaaaaaagaaggtgctgatagcgcagagcttatgtgaaaaatccaatttaatgatatgggacgaacctctgaactatattgacatattttctagaatgcagatagagaacttgctctcagaatttaagccgacaatgatttttgttgagcaagacaaaatattttgcgatagtatcgcaaacaaaacaatccatatataaatgtattccgcatttgtaaaatacgtagtataaatttgctgactaatatactcgaatttactcatcctgcatattcaatattttcaggctgaatacatatttttcagcccgaataccatatttgcagcccgaaattctctagatttacatgacagcaaaataatgttaagcaaacttgttccgcacttacagccttatatactcctcatttacaatcaaacattttaaaattaaacagaaaaccagacaaaaaattaatggtgtttttagtgaacatcggtaggtgtgaccccacctgtataaggtgggtgttgatacatagtgacctgttttgactaagctacaatgtctataaattacttagttgtgatgtattgcgcgcttgcgcgtctcgttaggtgagctgccatctcacgcgaggcgtgggtataattaaaacagtttgtcataatcctttttattaataaattttcccacgactgcgcgccttacgcggcaaactccgtttgccctaccgatgcttgctaaaccgcatttttataactttataattttaaatattttcttatatgcggagtttttttgcgaacagcggtaggtgtgaccccacctgtataaggtgggtatgatacaaagtgacctgttttgactaagctacaatgtctataaattgcttagttgtgatgtattgcgtgcgagcacgcctcgttaggtgagctaccatttcacgcgaagcgtgggtataattaaaacagtttgtcataatcctttttattaataaattttcccacgactgcgcgccttacgcggcaaactccgtttgccctaccgatgcttgctacaccacatttttctgtagtttttatattccttttcattaaatttatccttaacaatctgttctatttatagtaaccgttccatttcgtctcattctttcatatacataaacttacttcttttatatagtaatcgtatattgttcattgtagcaattacgtctgcagttcttctcagagacaaaatgcttactaaaataatgccaaataaatgctgtatcataatataattgacgtcttgaaatggaaattattatatgttataattatttatactgacattgaaacattttatataaataaattttagaatggagtgatttttttgaacgaaacaattaaaacactgctggaaagaagaagtatcagaagctttaaaagcgaacaggtcaaaaatgatgatttggatttgattctaaaggccggaacctatgctccgacagcccgcggcacacaagcgccggtcatggtcgttgttcaggacgctgagaccattgctgaaatggagaaattgaatgcggaagttatgggaaatcctgaagctagacctttttacggcgctccgacagttattgtagtattctctgacacccgtcttaccaataacgcctttcaagacggaagccttgtgctcggcaacttaatgaatgccgccttttctttaggagttgactcctgctggataaatcgggcgacagaaacgtttaaaacccctgccggaatagagcttatgaaaaagtgggggcttgatgaaaattatattggtatcggaaactgtatactgggttacagagattgtgaactccccgaagccaaaccgcgcaaagacggatatataatccgaacataaaccaaaataggagagtatacaaatgaattttaactggttgaaaaacaaaaaatttactgttatagccgctgtattatcggcaatgcttgcggcaggaactcttgcaggatgttcaaatgtttcaaaatcagactttgacgccctggaaaaacgtgtagaagcactggaaaaaggcacagacaacgagagcggagataaaaactcatctgagacaaacaaatcaggcaaatcaactgcttctcccaaaacctcatcaaagccaagctctgataacggagagtttgactccgaaaatgtaagcaaggcaattgatgttcaggaatacgactatattgacgcagatgacaataagttttctttctttatctttgataacacttcaaacttcgacgtcaatgcccgaatagaaatagtatgcaaagacgcagacgacaaagtgcttcaggaaagcgaaaaaaaagttcccggattatcaaaaggcgagagttcattcgccagttttaaggtcgacaaagacaccgaaacaattgtcagaacagtgtattatgaagaatataaagggaaagacgtctcaatcggcgatatatccgctagagctataagagcccagggcggagccaacattaccattagaaacagcggctcggcagaagctgaagatataaaatatttgacgctgtttttcagcggcgatgatttggtcggatttgattccgataaagtcccggatattgaagcgtcatccagcaagaccctggcttctgtctgctacgaagaattcgacagccctaaggtttatgttgctatagacgacgaataatccgagaaaaatttatatataaatttattaaaattgggaacttatcaaaaattattacgtcttataaaatatagggagaagtttcaaattctgacctatctttagcaaagacggcaaacacagatgaaagtgcgtattcctctgtctatcaccgccgtctttgctaggcacccttataaattattttatggaagtaatccaaaattgggtttgttttcaatttattttctgtaaacaaaatagagcttcattatattgtgtcaatcttcaaatgttagattttttgtctaatttcaaaggtcggctcatattgcttgaagccctatttttttattatctcatattatcgcatacagttattcacatatttcaccggaacgtccattctttcggccgcttcttccactgtcattccgctgtctataaaacgcttacatacgcttttcatattttctccaacctcaataatatgtttatcagggtcataaaaacggacaactctctgtccccacctatgctcgtataccttatgaagatagtctatttcaagctttgatagcctttccgtaaacttgtcaaaatcatcttcttcaaaatatatttccgcatcgtttccgccaaaagaaatatctttatctgacgcattaataaactcgagccacgagtcttttgtttgaagacacaaccctcccgtcagagttatatttgctccaaagtccataatcacacgcagacccaatacttctttataaaatttctttgaattttctaagtctgttactattatcattggattttttaatttcattttgtctacctcactatttttatttaatatcaactgatttataattatctatacaaaacttctaaattgccgttatatcccatactatccgactttcccggcgcttttaataatttgcttttttcattctttattcctgattttttcgataacagtccctatgcccactcctaatatcattccaaataccaagccgtaacacataaattttcctattttcccctgagaaacacctaaagcacaacctactgccatccccagtattgttcctaaaatcatacatatggtgattggtttactaattttttcatagaacatctcttcacacttccatcttcactctcgataagcagcaaactaaaaatcaatacaataactatttataatttttatcctctaaataacattatgaatttatatttaaaaaagttgcttcataagcgggcttcacacacatgcggaggaatattctctataaaaccattgggacgcaattgacagcaagacaatgcgctggacttatccttaaacgcttctgcataatcataacatatatcaacaaattctttataacttttcctagacagctgtaataaaaatcaaactttcctccgccagcccacattttgccccaaaacctcgcaaaccgtacaaattatattacttcacagcggttacattaattctcctgaatgtttcaaagcacctgccgtcaggctgaatcgtcctgctaatcatttcctcaacaacttcgctcctgaactcttcttttaattcgtcaggtatctgctttataaaaggcacaatgctcggctggtctatccatctaatcatttcttccttatcagcaaaaaatctatcttcatttttttcagacacttcagcttttgagaaatttactgatttgattaactctatatactctgcttttgacggcataaaccagggccattcaaaatctttaaaatactcagcgtatttattgcttttcattttttcccgtataacttcaaaaaagtttgaacatgttccgccgccggcaaagttccaggctatttttccattgggttttagagccttataactcctctccaacaaatttttatggtctataatccaatgtaaagcggcatttgaaaatattaaatcaaatcttttttcaaaatccataaaatttacatccatttgaacaaattctaaattttcacagctcagtttttttgccgtctcaatcattcctaaagatgcgtcaatccccaaaacactcccacggggcgttaattctgacaactgctctgtcaagactccgtctccgcagcctaaatccagtattatttcgtcaccgcttaactccaatcccgaaatcagtctgtttccccattctttctgatgtttagaagcctttttgtacttttctccgtcaaattcatacgttcccaatattaaacaactccttattgcagttttaattcaatttattggattattaccaatattttaaattcttttttatttaaatttttagaatattaactcaaaatgtataaatccaactagaaatgataaactccaaaaccgacgtatactctatagaattcaacctttatagaatttattatatctaagaatatactattctgctatctgatttaaaaaatctttaaaactacattacttataaattttaacatataatattaaaaaattccagctttatagaatttattatatctaagaatatactattctgctatcagatttaaaaatcttaaaaactacattgcttataaattttaacatataatattaaaaaattccagctttaataattattgttgagcacaaaatatgaaatttagttaacaacatatttatatgcaataagtatttatataattatttgggtttggatatgcacgcgcagcgcgcggcggctgctcacctaacgcggcacataaatgtgcccttccgatgctcgcttcaaatcttggttttgctatatcttatttttaaaatagtaaaacaaaattgattatgtatataaccattttatatatttatgtagaaaaaatgtgcatttacactcaaaacacggtctattttttaattaatcaatacaaaaaataaaatatatatttatctatcttaaaaagcagatattttggcgagcatcggtaaggcgttcttgcacgcctcgttaggtgagcagccgccgcacgcttagcgtgcatatccaaacccaaataattatataaatacttattacatacaaactaaacgcatttttaagctattaaataaacagatatattactgaaagcttcttttattatataaaataaaacagaagctcaaatattaaaataaatatctgtgcttctgcttaaaacatattttacaaatgattataatctaattatatcaatttacttttttacaatcggtagccatacttcgctcctgtaatcttccgcctgctgataccgctcaggataaacttcaatatccggcgccgcagcatattcatagcctgatgttgggagccattcagatattatacgctgctgtgtattttgtattgattccggcattggtccgacgctttcaaacattgcataggtagtctcaggaataatatattcttccatcccatcaggaacaggtttttcagtagcgacagctataaaatatccggaaaaatctcctttgtcacaagttgaaactcctaatattccctcaggctcactgccgtccatcaaagcgcacaacttgtcaattccgccttgctcgccaacatttttccagaactgcggaactttttcgaaacagtcttccattgtcataggctcttttatagaaaaccctacgatacgaaatgattttttagtcttaattttgtaatccattgcttcttctccttttattgataaagtgaaggtgatacgcggaaaagttgtaagccggactccctctgactttgccttagacggtgaaacaccatgtacactttgaaaagcacggttaaaagctgtcggcgactcatatccatacttaagtgacaaatcaataatcttttcatgaccgtttatcaagtcaaaagcggcagcgctcatacgtcttcttctgatatattcagaaattgtaactcctgcaatataaggaaatattctttgatactgaaacactgagcaggccgcaagctgagccgccttctccatttctatagtttcggtcaaattttcctcgatatattctattgatttatttagtccttctatccaatccacttttatcaccttccaaagctattatacaaaatattatatttaaaaacctctctgcctctgaacaattaaagagagaatttgaaaagtcagcaaaaaataggcagaaagtttaaagttgtttcttttgtgatgtattatgaccacatctgcaagttgggttacatcttcgggtgcttgccaagcacatttttataattttattgaattattttcctatatactatgttctcagtgaacatcggcaggtgtgaccccacctgcagggtgggtgtgagcccaaatatctctttatccttaaaccttcaatgtcaataaattacttagttgtgatgtattgcgtgtttacacgcctcgttaggtgagctaccatctcacgcgaagcgtgagtatattcagagcaatttatcataatccgttttatactaaactgtccctcgactgcgcgccttacgcggctaattccatctgcattgagtatacatattattttttgcgtattcatattattgacattgtaggttaatcaaaacaagtcactatggcttacacccgccctacgggcagggtcacagacattgtaggtttatcaatacaaagtgatatgtataacacacacttttaaaaaaaagtgtggtaacagccctgccgatgcttgctaagccacattttttatataatttttattatattaactttaatatttcagtttaatttattgcattctctccaattgttatttgagtataccacaggttttataaaaacatattaaggacatatccgaatattaaaacggcataactgaaattagttatgccgttagtattaattttcttaaccggatatgtatgatttacactactaagaagttgctgaaatcagcatagccgcccttttcaccgacacaagcaagcgcaaattttgctcctacccatttgccctgcatacattcaaattcaccaagactgatgaaatcgcttccatcaacgctgtatgatacacggcagctcgcttctttactatttgtgcaggaaataacttcaagccttaaatatgcctcggttgtgccgacacacttatcagtaactttccattctctgttatcagtcttaaagttaccgttacagtattcaacaattccctcatcagtcagcgctacataaccatatttttgaccaataaccgccagcactgccttattgtttccaacgcccttaggcattgaaactttaacagttgcaaccatcgaaggcgcctgccaaagctgggttaaaagattcggaagattccagagatatttatcctcttttgtctttaagtcctcactgtacagtctcagacttcctttattttcagtaagtgaataccattcttctttattattagcctgccactgccactggagaccaagtttatctgatgaaaaatcatctgaagtaggaattgtggttatcggatattctgcgccgacatttggcttcttacaacgcataaccggttgtccgcacaggcctgtgtccacgttttcacccattaccggccatccgtcaacccattctaccggctgaagatgaataattctgcctattacctctaaatcctgaaaatgtacaaaccagctctctccgctttcaagctcaaccagtccgccctgatgaggaccgttgatttctgtaagaccttgacgcaatacaatgtgatcttcatatggaccgtaaacattctttgacctcattgccacctgccagccggtaggaacccctcctgccggggacaacacataatacattccgtctcttttataaaatttggggccttctatagtcggctgacttatagttccgttaaatataatcttatcttcgcctatagcttttgttccgtcccaagtcatttcgcagactgcaatatggctcttgattccgcagcggctgttggcgtatccatgaactatgtatgcttttccgtcatcatcccaaagaggacaggtgtctatgagtccaaccccttctttaacgagtatcaaatctgaccactcgccgtatggatcttctgtccaggtcataaatatacctatatcagggtcgccgtaatatatgtaaaactttccgtcattatatcttatagccggcgcccatacaccgcagccgtgaatcggcttattatatctgtcgggaagctttttgacagcgtaattaataatttcccaattgaccaaatcctttgaatgcagaatcggcagtcccggaacatatgtaaagcttgaagcggtcatataaaaatcgtctccgaccctaatcacatccgggtctgagtaatcagcatacaaaattgggtttttaaaagtcccgtctcccaaatccgcaatccattttccttccagtgtgttcataattttcctcctaaatctaaacatatcctaaatcaggcggataaaaatccgcctgataattttataaatacatatactatagttataattttgtattttgttaaaactaaataatatcgtaagttttctaattttaatcaaaaatgacgatatgcaataataaaaatttttagcaatacttaatcacctgaagaaaatatataggaattcttagcctaaaatttatcaacgttagggttaagtttttgcaaatattttagcaaacaataatcccttattaaagaataaagttatattatttaactgataactttatgacagcaatattaactgcttaatacaattttctcaaatgatataccgttaaaactcaaccgctattttctctcatgatacttttatcaaaaatcacataaagcgatttcctgacttttagcagttgccatattttaatataaattcatcaagattctacgccaattatctcatctaaaacaactctaattgattatttcgagttttcagaacttctcactccatcgtaaagataaagcgaaaatctctgcgtataacaatcagtcaaatctataaaaccactccgtctttaaagatagaaatttcacgataaccgttcttctcgttatttgtctgtcttccgtttgctacatctataacaaaatcaaacaaatcctgagtgagaacttcgccgtctactataggtcctgcattaaaatctatccagtgcggttttctttcagccagtcctgagttagacgaaatttttacagttggaaccggagctcccagaggagttcctcttcctgttgtaaacaaaatcaaatgacagcctgaagcggtcagatttgttactgcaacaatatcatttccgggacctgtgagaaggtttaaaccctgctttttcacatgctcgccaatctgaataacgtcaacaacatcgctggtaccactcttctgcacacaccctaacgacttatcctcgagcgttgttataccgccctttttgttgccgggagaaggattttcatatacgacctgattatggcgcataaaatattccttaaaattattgataagatcaacagttttgtcgaacgtctccttatcatgacagcggttcatcagcagagtttcagcgccaaacatctccggaacttcggtaagtatggtgcttcctccgtgagatatcaaaaggtctgaaaactgaccaaccagcggattagcagtaagtcctgaaaaaccgtcgcttcctccgcactttaatcctacaaccaattttgaaacatcacatttctttctggtaaacttctgagcgtactcaacaagctcaccgattagtttcagtccctcttcaacctcattatcatagtcctgagtggacataaatctaattctttcaggattataatcccccagtatacccttaaaaaccggaatattgttattttcacatccaagacctaaaactaaaacaccggcagcatttggatgatttacaagaccctttaaaatcgcctgagtagttttttggtcgtcgcccagctgagagcagccaaacggatgaacaaaattaaatataccgtctgtttttccctcaaacagcttatttgcttcacgtgcaagcagttctgatgtcttgttaacacagccgacagtattgacaatccatatctcgtttctgatacctacgcttccatcatcgcgcacataacctttaaaatatgccttttcgtctgccttttccacacctttaagctgcggctcatatttgtattccaatataccgctgagattagtttttatgttatcggtatgaacatgctctcccttttttatatcgcgtattgcatgtcctataggataaccgtattttataatatcttcgccctctttgatgtcccggtttgcggtcttatgcccgtcaaactctccgcccacatttacttcaacattgtcaagaggacttattttaatttttcccatttgtttatctcctttctcaaagcgaaagaattaacatatcagccgtttacaacttcttccatagcggctctgatacccttttcttctattgattttagataaccgtttattgagtcttttaacatacttaaatctgttccccaatattcttcttttgaaagaatattgtcaacagaagccgtcttcataaattccataacatcaggattatcgttagcagcgtctgttctatagaaagctataagtgcagccagcgagaacacaaggcactttggctccttattgttctcttttatatattcaagaactgacggcagcactctgacctgatactttgatactgaattcaaagctatgctgagcaaatagtgcttgatgaaaggattctggaaacgctctataacatcattggcaaattgaatcaattcatccttaggaaggtcaagagtcggtataatctcatcaaatacaccggtcttcataaagttgaaaacaagctcgtcatccatagcttctttaactgtttcaagccctgcaaggtgtgcagcaagtaccatcatagtatgcgcgccattcagaattctaacctttcttttcttatatggcgtaacatcatctgtccaaagaacgttaagccctatcttatcaaaaggaagttcctctgcatatttcttatcgccttggattacccacaggtggaaaatttcagcagtgtctataatattatcgagatagccgtattccttctccatctcagaagcagtatcacgcggataacctgtaacgattctgtcaaccagagtattggtgaagtaattctcttcctcaacccacttgataaagtcatcgccgtagccaaagtctttagcatacttcaaaacacaagccttaagctcatcgccgtttttatcaataagttcacacggaagcagtaaaaatcccggaagcttattatcaaatcttctcttcatgaacaaagtcagtctgccagggaatgtaagacctgcaaaatcatcaggattttgattcggcttatactcaataccggcttctgttgtgtttgaaattatatatctgagttcaggatttgaagcgcactcaaagaattcatctgtattctcaaatgggtttatacctcttgtgatacagtcaacaactcttgtctcctccaccttttgaccgtcctgcaaacctctcagatacaaggtgtacaagccgtcctgctcgtttatcatagggataagaccctgtgcgagaggctgaactactacaactccgccgtcaaagtctgcttccttattcaatctgtcaatcatccaatcaacaaatccgcgcagaaaatttccctctccaaactgcaaaaacttctcagtaagctgacatttttcttttctctttagtctctccataaattgttcctcctaaaaatatattaacgttcaattttcaagcacagcttatattagtctacgatcttaacaatctcctggttctcattgctctttgcaacaccgttcactgctaaggtagcattagattcagcgtcagtttcgataaaatcttttgccgtaggcgaaaccatagagttgcttatcataatatcctttgattcttttatttcaacagccgtattgcttccctcagaagtgagaccgctgaccttaaccaattctgatttttctatgattattgaagaagttttttcaacatccaaatgcacgttattaaaacttacgtctttcatattagcgcagtagaaaccgtgaccctttgtcggctcaatatgccaagccataatcggcgcacttgccacatcatgatcaccttttgtcatagaacatacaaagttatcaacatgaagactggtaacaggcatctcaggaataccatatatatatccggcagcacacttaacttcacgcgcggtaacattgcttatgtatatattcttaaataccggagtgctgtcttcaaccggttttttatcaagagagaataactccatatcattagggtcggttcctccgcatttataataaccgtttattgtaagcggtgcgaacacgtttgtcatcataatattgtctattctaatatcctcaacgcttccgcctctcttacggcgcgtcttaattcttatacctctgtcggttccgttaaacacacagtttgaaatcgtaacatttctaactccgcctgacatctcgcttccgataacaactccgccgtgtccgttattcatagtacaattggttatcgttatattttcgcatggatacttcttctgcaaatagtcgtcctcggttcctgatttcagagtaacacagtcgtcacccacatcaacctgacagtttgaaacatgaacattagaacagctctcagggtttataccgtccgtattaggagaatcagccggattctttattgagataccgtcaatcgtcacattgcggcagcacataggatgaactgtccacattgcagaatttatgatactgataccggaaagtcttacattttcacacataattggttggaaagccctgggtctctgttcatttttaggatttgaccaccagttatatcctcttccatccaatgttccgcggcctgttacagttatattttttgcatttcttgcggcaacaagtccggtatgcccttctctgttatatccttctaggtcttctttagttatcattgggtagtcctcaggatcagcacttcccaaaattgtagctccgccttcaagatagagcgtcatattgtctcccaagattatcgaaccggtaacatattctcccggcggaaaatatattgttcctccgcccagctttttcagttcaccaataacctcagctatttttttagtgttattggttgttccatcccccacaacaccaaagttggtaacatcaagaacagatgaaatagtgttcatttgtaaaacctccgtttttactatatccaaatttttatttcttttttattatcttacttgccgtttaatactctttttaaaatactatatctaacaaaatactaatatataattgttttactatcaatatatctaataaaacataagctttcaaatttaatatacttcgtgttttaatctaatcagccgggtattccgcaaatttcccaacatatgacatcaacgtttccgcctcgtcatgcgtcagctgcctgctccagtccgcccgttcagacacatctatcagatgtccgtgagaatctgtattattatattccaaatatctggtattcttcgcttctgtcccctcttcaagcctccacggaagccatccaaccggggcgcagtcaaaattataggtacattctataaatgcagtatgtgaattgattccgtcgtcctgcgctctccatgggcgtcccaaatatatacattcacaattttcgtttgcgcttatataacaatgataaaaaacaaaacctgcttctttgttttcagaagtgtttgccgccgttatataagattttgagcgaacacaatttatatcacattcctcaaataacgctgccgcgtctccaaaaataaaatcaacgcttccctcaatataacagtcataaaaaaactgtcttgtttcgctgccatgaatatacatggtatcctgccagcccaaaaaattgcaatgatgaaaaactgatttatcagcaccgcagcttattgcaagcgcctgcgtcacagctctgtcagaatcaattctgttatagctgttctcaaacgttatgttttccgccttaaatccaaccgccgtttcttcaacagtcactgtcgcagatgtaaatgtattatattctagaccattttcatcacaattccccgaagcggcgtcataggtcaatgttacaaagccatctccaaccaaagttagatttttttttgcaatatttatcttttctttatatattcctgacggaataacaataatatccccgtcatttgctgcttcaacagcactttttacagttttgtagtcacgtcttacatatatattcatatttttttaccctaatacgcaagacaactgccaaatatagcattcggcagtatcttgcgttttattaaatttagtgttttagttagatttatttattacttaaatctaatttattatcttactgagcttttgcaagttcagcattttctttctcaatttcagcctttgttctctcataaacagttgtctgaagttcaataaactcctgcagaccaactttgttcatgtcagaaatatacgcgttccactgagcatcattgttaggatcaacatcgcctgagaagaatctctggagatattcatctctcttagcgttaagagctgtctcaaggtcaccgaacttctgctcttcatcctcagtatatctcataggaatctgatcgaagtagtaatacttatcctgtgcctggaaagcgtcccaaagagcttcaactttcttaccgcggatattgtcaaacattgtctgctgttttgcgaattgtgaaccgaatgaaccgaattccttagataaggtcttatctgtcttcttatctgtagccggattactctcgtcataccagcctggaagcatctgcggctcgccgttaactatttcataactttcgccttcaacaccatatgtcatatacatctgaccttcttctgtagcataccagttaaacatcttaagaagtgtgttgtatctgtccatatcgtctgaaataccagcgctgaatgcaggtccccagtttgaatacagagggtctttcttatagatagtacccttttccgggaaagctgttatcatattacctgtccactgccaatcagatactttatcaggatttgttccctttgtcttcttattaaactcgtctatgttataaacatagttataagttataaagcagttatcctgtgcaagtcttgatgagaaagtatccttgtctagtgaaaggatttccttatccataaagccagcgtcattgaacttcttgattgtcttatacatttctcttgcattatctgttgtcaaagcgtatggaacatactctttagtaacagggtcaacatatgaatgctgagttaagataagctcaggaatccagtaagcctggaagaaacctgtgagcgcgctgcccggtgaagttgttcccataccattacaagaaattataatcttatcaggatatgcagctttaatctttgcacaaacatcataaagctcatcaattgtcttcgggaactcagttattcccaactggtcaaatacatcttttctgtaatcccagcacatctgagttttttcctgtctcagtgtaggcagataatatagttctccgtctgaactcttagcgagcgccaaaacctgcttaaagtcttcttcactccataagtttttccaatccttcaagattggattatcacctgtataagcttcttcaggaatcgggtctaggtatttattggtagcccatttcttatactgaggctctttaccgcctgttgtgaaatctgcttcgttaccggttgaatatgaaatgtttgtctttgtttcccagtcacctcttgggattctttcatattcaagttcaacgccaaacatgtctttcattctcttagcaaaatcagtatcctgaccttcagcatactcggtttgatcctgagtatacatattcatacgataagtataaattttattgccttcgctgtcaacatacgagcctctacctgccgagccgcaggaagccagcaaagaagaagccagcactactgatgtagctaaagccacaaccttctttaatttcataagttttatcctcctaaatatatttagtttaattatgcttaacccttaacagaaccaaccataacacccttaacgaaatacttctggatgaatgggtatacacacagcataggcacgatagagataaacagcgttgcatacttaagtgaaacagtacttactgttacagtgttaagttcgccggcagcctgcgcttcagcagcaagctggttctccataactatctgtcttataatatactgcaaaggatacagattcttaactctgtcgctcagataaagcatagcgctgaaccatgtattccacatatacacaccatagaacaaacctacggttgcaagtgcagcctttgaaagaggcaaaataatcttaacaaaaatagtaagttcgtttgctccgtctataaatgcggcttcttcaagctcaaccggaacgctttcaaagaacgaacgcataactatcaagttataagttgaaattgcaacaggaagaatcaacgcccatcttgtatcaagcagtccaaccatctgaactatcaagtatacaggaatcatacctgctgtaaagaacattgtgaatacaatcagctttgtaataagaccgtgaaacggaactctgtcctttgaacgcgacaacggatatgcaagcgttgttgtcagcgccagggaaataactgtatacaaaactgtgttgattactgcctgcaggaatgacattggaaccgtcttacctgtaataatttctttatacgcatctaagttcggctcaacaggccacaaaacaactttacctgcctcaaaagcggcttggctcgaaagtgaaaccgagaaaatgtagatgataggatatagagttacaatcatgagcaaaatcaaaaatatgtaaataactacatccaaaataattgatgatactgtattgtcttttaccattttttagtccccctctcttaccacaaacctgtatcggtgagttttctcgataagaagttagcgaaacatacaagtataacgttaattatcgagttaaacaaaccaactgccgtagagaatgctatctcaccctctttaagacccttgttgtagatatatgtacttagtatctgtgaatgtttatatgtcgcaggctgctgcaaaagcaaagctttgtcagcgccgagtgacattatcttaccaatctgcataacaagcagaattacaattgtaggctttataagctgaatagatatgtgccacattttctgaattctgctggcgccgtcaatagtagcagcttcataaagctcctggtcaacagctgaaagagcggctatgtaaataatagcactccagcctatactctgccaaacatctgaagcgatatagaccgttctgaaccactctgttctctgaaggaatggaataccttcttttaccagatgcagtttaagcaaaaactggttgataataccttcatttgcaagacttcccgcacctacaggagtttgctgtgaagacaagaacaatgtgagcataccagcaactgccgcaactgatacaaagtgaggcagatatgatactgtttgtacgattttcttaaacttagcacctctgagttcgttgatgaacaatgctaaaataatagccagagggaacagccaaatgatatgtaaaacactcaatacgatggtattccatacgtagttccaaacatcaggtatggtgaagaatctaataaattccgcaaaaccataattgtctgcccatggacttccaagaatacctaatcttggctgataatctttaaatgccgctaacaaaccataaaaaggccaatactggaaaattgcataaaatgcaacacccggaatcatcagcaacagcaagaactttcctctggaaaatttgctgcattcatttttgaaccagccggcgataccctttttttctttctttgtgctgccggcactggtatcagacgccgcagccgcggccgcagccgcttttttttctttactcaaagcgtattcctccccttctcaataggataataggcaataaagccatttctataatacttatggtattattatataagatttgcacaaataaatcaagaaaaattctaccatttttgcaaatttcacaataaaactttaaatattataaaaattacaagttttttgtgctttttacataaattttatgctggaatttagtctattttgacatctattttgacataaaattataaattacaacagccgcttctgctctattagcataattgagagggttgaaacaattattttggtcaccctgcataattccaagagcgtataaagcactcacgtatggtcttgcccaatccgaaatcatatcagcgtcgctgaactcctctgtcaagtctccgtaaactgctgttgctccgtccacggctctgcatatcatagccgccatttcttcacgcgtaacatttctgtcaggttcaaacgtcagttctgttgtaccgttaatcaatccatatccatatgctttgtttatatactcggaataccattccgacttatcaacatcagcaaatgaatgttcaccctcagtgatcaccgcatttggatttttagcttcgtaagcaccgacgagcatttttgagaactctgcacgggtaacattaagttcaggattataacatcctgttccgtctcctgatactataccctgctgagtcaaatttgcaattgcgggttcagcccattcaaatccggctaaatcgctgaatgcacctttggagattctaaaatcactcagtttaaattcagacaccttaaagtcttctgctgaagctccgaacagaccaaagtaataattttcacttaaatctgtctcttcttctccgactttcagccactcagctccgtcctgagaatactctgcggtaactttattgcccgtcttgtttattctgagccaaacaggtgtatttttatatttctgctgacctattttttcatatactttgcccttttcagagttctttgtaaacaattctccattataaatttggaaatagaacgcataggaattgtcgccggcactcagtccgtctctcagcaaaaatcctacctggtcatactcgctgacgtcttgggcctcaactttgaatgaagcagtaaaatcaccgttcatacctgtataagcatatgggtactcctcgtttgcaacatccgctactccgaatcctgttccgtatatttttactgtgccgtctgaattaaaatcaaaagcacctctcatcttgctgtctccaacactgacagcgtcccagcccggcatagctgtaaggtcagatacgcctatacttacagacgcgctgtttttggctccgtccttatcataagcaacggcagtaacccagtggctgccggcttccaatccgtcaatcttaacattaaacggagctgaagcgtcttcctgatacaacttaccgtccacatacagttcagctttctctaaagcttcactgtcgcctgaggttacattagctgttatttcatctgttgtataatactggttttgttcagagcttattccgttacggtttgagcttatagaaagctcaacgtcgggaatagaattctcgccataattatcaagagtcaagtccttatatttgccccaagcatatgttgagatttcattggtttccttattgccgtcctgagcaactccgccgtaatttatacctgagaagttaaccattgtctggctgaggaggttccagtctataccgttctcagaatgataagcggatactgtgctgccctctttaaccagctttaaatatctcggcaatacttcaagctttaaaaattcacggttatactttccgtcttgtctgtatttgaaagctatacctgagccgcccttttctatttcgtagttaaccataacgaaatctgacttttcagtcaactcatcacgaatcataagtccgctggcacagttgttattcagccttgaaaccgaggcaatctgtgtagaaagaactgcgttttcatcaacaggctgatacatatatgagaatgaatcagtagtcggatcgcccagcgctatattaaaatcatttccgggaccgataagaccgctgctcttaactgtataaacgccgtctcggtatgaatagcttccgtccattgtggactcgcctatatcggcagtcagccacggcgaaactgaatctgtataattaatatttataacctttatctcagaagttgtagcttctccggcgctgtcaaccgctcttgccgacatatacgctatcccctcttccgcattgttcagagtgaaagtatatgggctggattcagctgttccaaccatctcatcatttttatagaattcaaccttagaaattgaacggccgtcagctgctttggcttcagctttgagttctatcggctctccgtaattgtaacacgtattgtttttaatatttaaagtaacttcaggattctgaggctcagccgcagattcaactataccgttaagataattttccaggtttgtatatccgttgtctgcaattatctttccgtcagccggatcagatttatttaaaccgttctgatcctcataactatccggcattccgtctccgtcagaatcaaaaggtgcttccgcgctgtttaaagttggccatccgccgacttcagattcattattaaccgctcttccggtaccgtttttggtgtcattaataactcttgcatcatatgaatcacgtctcggaacagtagcgccggcgtcaacaagtattttttcgtatgcttcctgagcagtgtctatattatccataggaataagcgtatcatagacaggttcgtcaacatagttcggagcttctgcaccctcgttcagaataacgccctttagattatcgtttgtaacctcactgtttccttccaaaacgtttccgctgaaatagaacactccggcctttgacggattccaaattctgttctttacatccgcatttgtaataggaccggttttgtaatagttatttataacgtttactgtagcttcctcggctccgtaagcattattaaatccccagttgtaaataacgttgtttaccatatcgttgtcatttatcccctcaaaatccgggtgtgtgcttgacaatgacgagtatctcggcaaacggctggtgtgtgtagcaacaagattatgatgatatgttacattagctccgccccatattccgccgtaaccatgacggcctttggcatgaacagcaagcgcaaggctttcgcttatcatacaccactgaactgtggtattggctacgccatacaaagacatggtttcatcagttgaccagctggtagagcagtgatccagaattatatccttttgataccttgcaaacacagcgtcgttttctgcatgagaaatatcgccgggtctgaaacgcatatatcttatgataacgttatccgccgcaataacaatattgtagtctccgacacaaataccgtctccgggagccgtctgacctgctatagtaatattgggctggtccagctttaaagcagatttcaaatgaatggttccagaaacatcaaatactattgttctgttaggtttgcttaccgcgtctctaagcgaaccttcgccgtcatcgtttaaatttgttacgcggtacacttctccgcctcttcctccggttgtatattttccgccgccttctgcgcccggaaatgccggaagattaattgcctgagcctgctcaggtgtcataaatgtttcattttccaaagctgcttcttcagcaaatgcagccggcattatactcacaaccatcataacagccataagtaatgaaacaatatgtttaatactaaagtttcttctcataattgattcctctcttatataaagatacactccaaattaattttcttatgtttataaaatatccgatactccggagcataaaagctccggagttcttacatatataattatacgattttattcataaatgtatgtctcaaaactcaatccatacaagtttattcctgcgtctccataaacatatatagttgtggcttcaccggtataggtatactttgcgctcatttgagtagtcagaacagtcttgttctcacttccgtcattgataacaacgcttcttgttccgctgcttcctgccggttctccataaacgacaatatcagtagttccggccggaacttcaaacgaaacacatttgctggacttgcttccgggaccgcctattttatatctcttagggaaagatataccgtcaattgtttttgatttgctctcaagagttccggttgtagcaactgaaagacctgcatatgtctttccgccctcaagagatgttaaaccgctgaattcttcgcttgaaccaaagttccagaaatgagaatcgagcacttttttaacgtttgatgactggctgagctttacgctgacattatcaatataatatgaagcagtcataccggcttcaggctcaaacagaactgcgtttgttacatcgtatttcttttctgtattaatctgagcacggaaatcagaactttcaataccgctcatatcagcgcacacatttccatcctggtctttgagtaccatctgtgctgtatcaccgccaaatcccatatcagcaaccaaatcaacatgataccattttgaagcactgtattcataccctgtggactgtcctccgaaataaaccaatccatcgtctgcgaatgaaagtttaaatgccttatctcctgattttactctcagataaacattcattccggtcttatcgccggacatcatcaaatcagctccggcagtgattatattagtagaatcctcaggcaaaatatactcgcggaaaatatatctcggagacgaatagtcagaattagtagaaatcttcatctttcctgtctcgtttccgcctatactctcgtttgtccaggacgggttaagaacgtttcgctcctgcttctgccacatccaatcaagaccgtaattaaagttccataaaactgcgcttgaatcagatacttcctgcgctgtaccgtcaaacgggttacaaattggaatcaaatcactcaaattattccaaaggaatattttatatgtatccccatttacgcttccaacatcaacactctcgccgcttatctcagcgttcttagcgtcaaccagaaccccattctcatcgtatccgcacgcaataactgttcctgaggtgaaaccattgcccggattaatagtaaccacgccgttttcataactctttatatatgtttcggttccaccgccaaagctctttaattcttctgttgaaacccagccagcgtcagaagcggcgcttccttctccgcttactgtaccgaatcccatataatagctgtcgcctataccgtcgcactttatactggttaacagcacttttgtcttataaacggtcgagccgttttcagtttgatatatatttatcgtatctccaactttttcagcaataaagtataagttcgcagactggccaataacgtcagttacatcctgaacaagagtcatctcttcgcctgcgccgcttctcttcataagctggtatctcggcttaccgtcctcaccgatgtttccgccgaagtaatatgttacgccgtcggctgttaagtcgttctttataacaactcccatttgtttgccgtcctgcatacggcttctgtaatatatcctgttgtcgccgctgaactcctggcaaaggtatccgaatttgtcggatgttccgccaatactgccgcttgtatctgtagctattttataagtataatcattagttcccaaaacgtatgcttttacgtcatcgggagcatttcctatatcaactatctgccaaggtgaaatatcctgagacacaacaacgtcaacactatcagcacctgaacctaaattttcatcaaagcaatatacttgtaatgtgcctttagctacgcctgtaaattcaacaggaatattaatcgtttcttctctgtccagctcgtttgtactggaagcaagcggagcaccgttaaagtaaacccatacctctgttacctttttacccttatcaggagtaacctttacttcgacattagctgacagacccaatctgtcattattttttatattaacaatctttgcagcagggttagtttgctctgtcacaagctggcacacattaaactttgtaactgtctcgccttgctccacagctgaaacatatgcagaaaccgcagcgtttccggtttgttctccaacttcggcaaccttttcccattcagctaagcttgctcccgcatatagcgacagaacgccttctgactttgaaatcttaaacaacttatatttttcaatgctcttggctgcgccgtcccaaatctgaatatttccggcttctccatagtaaataacttgttcaaagttatcattatacatcttgcctataacaaatttagttccgctggtttcatcaagtgaagaaataccgctttgaacgtttatatttttattagaaagtttatctattcttgcaaccatgtcatagtcgccggaaatattagatttctccatctttccgccgtctaaaacagtatagtcatctccgtcataccacgcattttcagcagtccagccctccggcactgtatcaccggttacagagacggttttaaccgggctgaaaatataacttccgtcgttcttgataactttcactgtgaaatcattatcccctgttggaagttcagaaactgtaatcgctgcagctccgtttacaattgatgaagtttctcctaccttcttgtcgttgcagtacaattctgctttttcaatatttgaaactcctgcacctgatatgttaacagtaaagttaacttcctgattgctttgcacaacgtttttatcggcgcttataccagcttctatatcggttacaggagtttttgttattgcctcctcaacaaatatttcaagccaggtaagtccgtccggaccaatattcttgctgtcgtgaggattagttttgtcaagacccattttgtcttcccaagtatctgctatgccgtcgccgtcagcgtcataatcaccagctctagtctcctgcgcgagcgccggatatcctctgccgtcataatttgtggcgccctctggtatacaatccgtagggtcgtctacaagaccaacgctgcctttgcttccgattggagctgtgcgggtttcaacctcgcctattattcttgtatccacttcgtcacgctttggaagagtggctcccgcgtcactcagaacctcattataaacatcttctgcagcgtccagagttataggataattattatcatattcctgatattgttcatcaggcgtttcaattttcatattggtcttatccgcaacactataaacatttgttgcaacataaacaccggtatgcaaatcatcctgccagttgttctgattaacaagctgggcgtttttataatcgctgtcgccctcgtcaacatctattttatttccggaagcatatacgcttccaagcatattcggcttatacttctgcccaacgctaagctcaaaaattcttgagcgttttcctgccggtgttgccggacccggtctgtaaacattgttctgtatgtatgtcttagctccgttttcagttccgtatcccgccttatcgccccagttataaatgacattatttttcatatcaaccaaagtttggtcatcggtatatccctgggtcatagccacagtttcagatgtaccgattttaggattacggctcttatggctggcaatcagattatggtgtatagacagatttacgccgccccaaattgccgcataactgtgttcgcccttatcatgaacactttggttaagcgcctccgctataatacttctttggatagtaacatttttaacagcataggctgacaagttttcatcagtaccccagcttacactgcagtggtcgataataacattttcgcagtcgtcagttatttccataccgtcctgcgctcttgtgtctttgccctccgcatcatgagctccgacgcggaaacgcaaatatcttaaaattacattatcggctccgaccttaacattgttcgatctgaagcagataccgtctccgggagccgtctgccccagtatagtcatattgtcatggcttatagaaacattgctttttaaatctatatagccggacacgtcaaagacaactattctgtttccttttgaaaccgcatctctgaatgaaccctcaccactgtcattcaaatttgttacatgatatacctcaatctctccgccgttattataagcgcctctggctccctgggagtacattcctccgccttcagcgccgttaaaagctacaacgttcataatatttccgcctgcgcctcctccgccggctactgtctgcgcagcaaaaaccggcagggatacagcgcttaaaccaacagcggcggcagtcagcagtgagccgactttacgcactaacttacctctttttttcattagattttcccctttcctatgtatttaaataaataacaatgtctcagttcaacgattcagagctgaacttcataatataaatcaaatgaaacctgtcgcctaatcagacgaactgattcttctatataataaaaaattaattctcatataagcaccaaaaccgcagcaaatcataaacatttgccgcggcagtttccggtattgccggaaacgtttggcgctttaccgacatttatctattcatttcatcctgatgacctgtagctttatggcttgcgattatgctgtctatttctcccaaactgctgcaggacatatcgcccattacagtattcttaaccgccgacatagcgtttccatactcaataaccttctgcatatcatcacaggttatcataccatataaggctccagccaaatatgcgtcgccgcttccgacgcggtccacaacctcaatattcatatatggctcttcttcatagaactttccgtcatagtatatcttagatgagaagttatgaattttagggctgacaacgtcacgccttgtggtgcacacaactttgcagccatattcttcgcagtaactcttcattatttcctcaagagttcccgttttctgaagcattcttcttgaagtttcctcggacacaaacaaaatatccacataagggaatacagaagtaacagtttttctggccgtttcctcatcccaaagtgacgcgcggtaatttatatcaaaggatattaccgccccgccctctttaaacttcttcataacctctatagtggtctctctgagctgctcgttaagcgcaagagttataccgctgacgtgaaacacagaagtctttccgtaaatagacgggtctatctcgtctatcttaagagtggtcatagcggaattggctctgtcgtatataacagaagactttctaggatatgcccccgtctcataataatatattccaagcctgctttgtcctgagtggtcgtatacgatacagtcgtcgctgacgttgccgtatctaatcatatttcttataaagtgaccgattttattttcgggaagctttgtaataagagcgctgcgaattcccaaaacagctgaacccgaagccacgttcagctccgctccgcccgcttttttgtcaaacgtgtagctttgagaaatcttatccgttcccggcggcgacagacgaagcataacctcgcccattgttaccaaatcatattctttgtttgaatttataaagtccataatatcctcctattttaactcccctgtcatcaaaatcctaaatttctatgccgaaatactctttagcgttattgaaagatattcccttaaccacagtctcaagagtgtccatatcatcagggaattctccgttttcaacccatgtgcccaaaaggttacacatgattcttctgaaatactcatgtcttgtgtatgaaaggaagcttcttgagtctgtaagcattccaacaaacttattaagagcccctaggtttgccagcgctttcatctgctctgtcataccgtctctctggtcattgaaccaccagcctgaaccaaattggatttttccgggaacttcattgccctggaaatttccgagcattgtagcaagaacataattatctttcgggttcaaagtatacaatattgtcttcggcagtttgctctccacctcaagcgcgtttaacagctttgaaagaggagccgcaatacaataatcgcttatagaatcaaaaccggtgtctgcgcctagtttctcaaacattctggtattattatttctgagagctccgatatgaagctggaaagtccagcccaaatcataatacttttcaccaagcttaaccaaagtcttgctcttatacgcgtcagtctcaaactgggtcagtttttcaccgttcattgcctttttgaaaatagcctcaacttcttcatcagacacgtcctcaaacggaacactgtctaaagcgtggtcagaaacacggcttccaacttcattaaagaagtcaattctcttatatacagcggaaatcaaatcctgataactgtcaatttcagctcctgcagtatctgcgagcttctctatatacggcgcaaatgtaggcttgtcaatattaatcataaagtcaggtctgaacgccggcagaactttcgcctttatatgacctttttctttaatctttaaatgccattccaaattatcaacagggtcgtccgttgtgcagataacggcaacgtttgaatcgtttatcagcttagacgggctcatttgagttgctttaatatgagcgtttgccttttcccaaatttcatcggcagtatcttcgcgtataacagtatctataccgaaatatctttgaagctcaagatgggtccagtgataaagcggattgccgatgccgtactgcaaagccttgcagaaagctctgaacttttcctggtcgggagcatcgcctgtcatatatttttcatccaatccgcatgaacgcatgtagcgccatttataatggtctccgcccaagaatatttgggttatattatcaaacggcttgtcctcatacatcatttgcgggctcaaatggcagtgataatcaaaaataggcatgtccgcagcaaaatcatgatataactttttcgctgtctcattgctgagcataaaatccttatccataaactttttcataggtatacctccaaatattacaaaatttttattactttataataggtttatatatttacaatatagttaagcgtatgatagaaattatttacaaaatattcataattccctcacatagctatccttgtatattatacactataacacactaatattgcaaatgtttttttaagtatattaacggattaattgacttatgcgaaaacaaaacctttcattttgataatctgtatttctctttagcaaattttctgtatttttagaaaaactattgatttattgccacggctatgttataataaatcagtacaaaagatttggagggatagcccatgggtttaccagaaggacgcgacatatatattgaccacgaggaaaacgacaagccttatgtgatgaagaattcacacatacacgattactacgaaatctactatcttatggcaggcacaagaagatatttcattaatcacactctgtataatatggagccgggtgacgttattcttgtcaataagggagaccttcatctcaccacgatgatttcatcagaacattactatgaaagatatttgatgacgtttaacgataactttgttgagcgcgtttcccaaaacattgaccgggaacttttcatgaacgcctttgaagttaaaaaggtacacgttcccgtctctaaaagatacgcatttgaggcccttatacataaactcagtacagaatgcgagcgcaacgatgaatatgcagattttctcgcatattcgcatatggctgaacttataatatttcttgacagatgctcaagccacagcgttgttccgtttgatgacatcagtgttcatgaggagaggattcagcaggtatgtaaatatattataaactattataaccagcagattactcttgctgacatttctaagatggcatatatgagcccgacttatttttctaaaaagtttaaaaaagtaaccgggtttggatttaatgaatatctaaataacgtccgcataaaaatggcgacaaacatgcttgttgagacccagtattcagtaaccgaaattgccagattctgcggatataaagacagcaattatttcggcgacgtatttaaaaagataatgggggtttcaccaagcaaatacagaaaagcgaattatacattttaaaataatatcagcgtaaacctgacaaaaacgaaaaatttacaatataaaaagcaccttctttggttttatctaccatgggaggtgttttactttgtcagaaataaatataagatacataaaaataaaaccggctccgcgaaaacggagccggttaactgtttatattttatattttagaatcagaataattattagattatacttacaaatttatgggctcgtttatgttactctttcagatttcataatcattaaactttttaaattttccgaattcttataacacgataacaaacattattcttataacccaatagcaaacattcttaccatcagaccacatcgtaatgtaaaacctcaaatcaaagcgcataaaattgttttattttatattctcaaaaataagtgaaaataatcttgaacataattattctaaattttcatcttcagccgcaccggaatcaatttttaattctacagggttcacatgaaccatgcagtgtttgactttaggaaaattagcttcaatcgcattgtgaacattctcggcaattgcatgggaatctctaagcggcgtattctcatccgctcctatctccacatcaacatataattttgaaccaaacattcttgtcataagcaggtcaagcgaaatgacgccttcctggcttttaatcaagtcggacatctttctttcagtctcatcgtcacacgacttgtcgaccattttgtcaagcgcttctttgcagatattatatgcggctttcacaatgaacaagcatataacaacgctggctaacggatcgcaaatggggaaacccaatctggctcccaaaataccgataaaacttcctactgaagaaagcgcgtcgcttctatgatgccatgcgtctgcaagcaatgccgtagagtcaaccttttttccataaaaccttgtgtaccaaaacatgccttctttaacaacaatcgaaataaccgccgcaactaaagctaacgccccgggcacagccaaatctccgtaattgccgccgaaaatttttttgacgcctgttattccaactccaataccggttataaacaagacaatagcaagcacgattgcagctatacattccattcggtcgtgaccgtaagggtgttcctgatccggatctttcgccgccgcgttcgccccaatcatcacaataatagtgctgaacacgtccgaaacagagtgaatcgcgtcacttatcatagctcctgaatttgctataacacccacaacaaactttatagctgaaagaagcacgttaacaactatacttatgtttgaaacacgcattataatctttttgctgctttggctgttaagtacctcgttctccataatcacactccctatgtctattgaaatcaatacttttaatatgtatgctgaaaaattaattttatgacatattttattccaaataatctttcagctttttactgcggctgggatgacgaagttttcttaaagccttagcttctatctgacgaatcctttcacgggttacattaaactctttgccaacctcttcaagagttcttgctctgccgtcgtccaaaccaaatctaagtctaagcactttttcttctctcggagttaatgtgctcaaaacgtccaccagctgctcctttaacaaagtaaatgtagcggcgtcggacggcgccggtgcgtcatcatcacggataaagtcgccgagatggctgtcctcttcctcgcctatcggcgtctccaaagaaacaggttcctgagcaatctttaaaatttctccaaccttgtcaaccggcatattcagctcttttgcgacttcctccggtatcgggtcgcgtccaagttcctgcactagctgccttgaaacacgaacaagcttgtttatagtctcaaccatatgaacaggtattctaatagtcctcgcctggtcggcaatcgctctggttatagcctgtcttatccaccatgtagcatatgttgagaatttatatccctttgtgtaatcgaacttctcaacagcctttataagacctaaatttccctcctggataaggtcaaggaacaacataccgcggccaacataccgcttcgctatgctgacaaccagtctgagatttgcttctgcaagcttgcgttttgcgttaacgtcgccctcgctcattctcttggctaggtcagcttcctcagcccctgtcaaaagattaacttttcctatctctttaagatacattctaaccgggtcgtctatgctaacgccgtcaggcacagacatatcctccagttcttcctctgtaacctcatcgctttcatccacaacaggttcagggtctatgcttccgacgatttctataccctgtttctctattatttcatatattttatctatctgctctgaatccaattccagttcttccagcttgtccgcaactgttttgtattcaatcattccgagctttttgccgtcctccagcaatccttgaattatctgagcctttttcttggcaacggcaatatcaacttttttcgtctcagccccctgtttttcaaccggcctagaactttcggaaacaccggcgccggtttttgaagcctgttttgacgatttatttgtcacgtcttttgaaccgctctctttagcttccgtattctcaacatccataagctcttgattttcagcattcttatttaattcttcattatttttcataatatataacccccgttattcttttttcttccgctttagctcaaagagccgttttaattcttcttcatccccggaactaatcgccttttctttaatacgttcttcttttgataaagcgataatctccaaaggttttttggaagcttcatatttatcttttatatttttatcacttattaaaatattggatatttctcccacattctcaggtgagcatctgttcagaatatcattcccttctgtgccctcgccgctctcatataattcaaacaaaagcgaagccagcctcttatgtaattctgaacgtataaaatcatcagggactattccggactctttgacaagccctataacccttttatcagtcatcagacacaaaagcagtctttcagcattaaaaagctctctgtcccgatgactggctgaaactcctcctgtcattatgtcccgctctctccgttgtttattttcctcccggcgtcttaaaatagccttttccttattttctattccgcttatgccggctgaaatactttccggactgatagaaagctcttctgctattttgctgatatatatttccctctgagcctggtttttaaccctagataaaattactgacacctcattcaaaaagtcaaccttatcatccaaatcatccaggttatattttaactccgcctcggcaactttatactcaatcaaaggccttgccttttcaatcagaacactaaacatatcagggcctttcatctttataaactcatccggatccttgccgtcggttaccgtcagaactcgcacctttacgtcagcgtcgaagagaatatctccggctcttattgtagcctttttgcctgcttcgtcgttatcataacataaaacggctcttggagcataccgtttaaccaattttgcctgttccggcgtgaaagctgtacccaaagacgctacggcgttattaaatccattctgatgaagagacacaacatccatatatccctccataagaagaagcctgtcagcctttgcgtttttagctatattcaaaccaaatagattatcttttttcttaaacaccaatgtttcaggcgtgttccaatattttggagcgtcggtaccgtcttttactacacgtccgccgaaagctataacattccctctgacgtctataatcggaaaaataactctgccgtcataaaatgcgtcataaaatgttccgttatcacgctttttcaccaatccggcgtccagcatatcattttcattatacccttttttctttaaaaaatttattaaatttgaccatccctcaggagcgtatcccaatccaaaccgctttatcgttgaattactaatcatgcggtttttcagatacgttaatcccggttcacccgccggacttgctaaacactcaaaaaagtatctcgccgcctgagcattaatctcgtatatcttttcacgtttttttgatatggccagctgtttctgcttgtccctgccggttctgttgtccggcatttccatatgtaccctgtccgccaaatattttaaggcatccataaaatcaaggttcatcgccgcctgtatgaaatgaataacgtttcctcctgcgccgcagccaaagcaatgaaacatctgtttatcaggcgagaccgacaaagacggagactttctgtcattatgcagagggcagagccccatcatattattgcctgtgcgttttaaagttgtatactcggaaataatatcaacgatatcgtttctcattacaacttcatctataaagctttgaaaatcagaaccagccattattatttcctttctaaaaaatagtattttaaacttaaaatcaatttacccaaaacttaggtataaacagctcctcataccttgcaatagcgaacgggtcgctcattccggctatataatccatagctattatactattatcgtctgtcctgctgttgtttctggcgtcggcaggaatcaggtcaatatcatttacaaatcttgaataaagcccttcaataatattttttgccttatcctcttctgttgcaacttctgcatttttattcaaataaacattgtcaaacaaaaactgtctcagccccatcatcgcgtcatatatatcaggctccatcacaatatcatgctccatcacaatatcatgctcgcttcctgagatagccgcctttatcatggtatctattcttgctgaatgtctgttgcctaacacatcagaaaactctttaggtatatcgttctcgctgagcaaacctccgcgtatcgaatcgtcaatatcatggttcacataggcgattttatcagcgaccgcaacaatacgcccttccagtgtgtccgctctttttgctccggtgtggcatacaataccgtctctcacctcatatgtaagattcagtccgcctccgccctccaaaacatcaaccactctcaaactctgctcattgtgtttaaacccggtcgggcaaatctcgtttaaaactctctcgcccatatgcccgaacggagtatgacccaaatcatgcccaagtgcaatcgcctcagtcaaatcctcattcaaacaaagcgagcgggctattgtcctggctatctgagcaacttccagcgtatgcgtcagccgcgtacggtaatggtctcccattggggatataaaaacctgcgttttatgtttaagtcttctgaatgcttttgagtagattattctgtcacggtctctttgaaaatcagttctaatttcacaagagttttcactgcgtactctgccttttgactcgctgctccgagccgctttctcagacaaaatttccctttctctgttctcaagcatttccctgacgctcaaacacgacacctccgcataaaacaatgttaaactccctattaatactcgctcttatactattctacaaaaatagattttttccttttatctattgacaaaatgtacttttaataataaaattattttatattactaattttgaaaggtgtttctatgattcctcctacattatcaccaagactaaacaaaatatctgaactcataaacgattcagacgtaacagcggatataggaaccgaccatgcttatctgccggtatctttggtatatagcggcaaatcaaaatatgtcatcgcctcggatataaaaaccgggcctataaaaagagcggaatcaaccgtaaaaaaatatgatatgtctgattttatcagcctcagacaaggcgcaggactggaaacaataacccccggcgacaatgttgatacaatagtaatagccggaatgggcggtcttgtaatctcaagtatcctcgagaactcaccggaaatcttaaatcaggcaaagaaaataatactccagcctatgactatggttcctgaacttagggattatctgtataaaggagactttaaaaatataaaagaatacctggcggttgaggaaaacaaaatatataatattatttcagccgaaccgggtaaagataaatatgaagagccgtcgcctgttgagttattcctcggatgcagtcttataaatgagcgtcctgaacatttcagctcttatgtaaagcggcaggaaaacaaagttctgaagattattgacggactcagcaaatcatcagaacctgaaaatatagaaaaaattaggtattataaaaatttattatctgatattgaaaaatttatcatcggctaggaggaatttatatgccaaaagtgaaggatattgccgaatatattgaaagcttagcccctaaaaccctggctgagccttgggacaacgtcggactaatggtcggtgatatggacagtaatgttgagagcgtatacgtaacccttgatgttacttctgaaaatattgaagaggctgtaaactgcggggctgatttaatcgtttcacaccatccgcttattttcacctcaataaacagagtgattgaacaagacgtcacaggaagcattgtcagaagtctaattaaaaatgacatttctgtatatagcgcccacacaaactttgacatagccgacggcggaatgaatgatatattatgcgataaactcggcctttcaggggtgcgccgctttactgaatctgaatgtactgacccattcggaaaaccgcttgaccaaatcggacgggtaggaatcctagatactccgatagaaatggccgattttgttgactatgtaaaaaatgttttgggatgtatggctatcagctacgtgggaagcgaatccgaaataatctccacagctgcagtgtgcagcggcagcggcggagacttgatttataacgcctataacgccggagccgacgtttacgtgacttcagaaataaagcaccacgaggcacagctggcattggagcttggaataaacttaattgacgcgggtcattttgaaaccgaaaatattatatgtgattttatggaagactatttgctaagccgatttgatgatatttcaataacaaaatcaaccatgctgccttataaaagaagataaataagtacctaatgcgcttttataatttattttaacttaaattcttaatctacgaaccatttatattaattgcaaagtttatataaagaattttttacagattatattatacacatgcagttgcttcattttgtactttgaatctaatacagtgtgaagtcaacagatagctagatataatttaaatggtgtttatagtgaacgacacatcggttgggctgtgaccacactttttaaagtatgtgtaatacaactcactttgtattgataaacctacaatgtcaattgtgactacacttttatttaaaagtgtatgtcttataaactatataatgtgatataaactataaatgccaataattaacttcgttgatataataatcaaacttagttgtgatgtacaaacgaagtacgccgcgtaaggcgcgcagtcgcggaaaatttgtaattagaaaggtttataacaaactattctaaatatgttcacgctacgcgtgagatggtagttcacctaacgaggcagacgtcgtctgccctaccgatgttcactataaacactgtatatacggaaataattgaaaatgaacaataaagtttatcgaaaagtttaggtatataataaaaataaatattaaaattctataaaaatgtggtatagcaagcatcggtagggcgtgcgaagtacgccgcgtaaggcgcgcagtcgcggaaaacttgtaattagaaaggtttataacaaactattctaaatatattcacgctttgcgtgaaatggtagttcacctaacgaggcagacgtcgtctgccctaccgatgttcactataaacactgtatatacggaaataattgaaaatgaaacaataaagtgtatagaaaagttgacgtttataataaaaataaatataaaaattttataaaaatgtggtatagcaagcatcggtagggcgtgcgaagtacgccgcgtaaggcgcgcagtcgcggaaagctcccattgactacatcaactcttttatcaatttcggtgaactcttttaatcttttttgtaacacatcattgacaaacctacattttttaatttatttatattttataagtaaatatttttaaataaataaaaatgcactgttcaacttttatatttttgccaaaataaattattttacactacagaccaagatgtctgcggcaagccgcgacatcttggtctgatattggctgttttattcctgattgtatttctttgaaagctcgtcaatctttccgctttctttcatttcagccaaaactttgttgatttggtctagaagctctttattatcttttcttacagctattgcatattcttctgtttcaaaaacctcagggtcttcaacaaatttgagaccttctttttgtgccagggcaactcctgtagctttgtcgattacaacagcatcaagcttaccgtttttaacgtcttgaactatatcaattcctctgtttgctcttgttattttactgtcatcaattgcgagatcttctgttactatgctgtcgcctgtgtaaccgagaacaacgccgactgttttgttattctttaaatcttctgcactgtttatatcagtgttgtcggctttggtaataataacctgtgaagctgtgtaatatgtttctgaaaaatcaacgctctgttgtctttcttctgtgattgtcattcctgctactgccatatccaccttgcccgattttactgcggcaatcagaccgtcaaattccatatcctcaacttgaagctctttgttcatgctgccggcaatttccttgcctatacatatatcaataccgtcataatttccgactactccattagttgttgtaaattcaaacggcgggaaagcggcgtttgtaccaagcgttaatttgtcgtctttgcttccgcagccagacagaacccccattgtcattactgctgctgcagctattgcagctgctcttttaaaaaattgtttcattcttcttcctcctaatttatattttataattatttacaaaattttgcccaaaaaatctttagtgcgctgattctgtggattcccaaataatttttccgggcttccttcctccactaccattccgtcgtccataaataatactctggaggcaacttcacgcgcaaaccccatttcatgagttactactaccatagtcattcctgcgttagctaaatttttcattacctctaaaacctctcctaccatttccgggtcaagagccgaggttggctcatcaaaaagcattatatccggttccattgcaagagctctggctatggctattctctgtttctgtcctcctgatagctgacccggatatgaattcgctttatcagaaagaccgacaatatttaataattctatagcctttttatttgtatcagaggcattttttttcttaacttttattggagctaaagttatattttcaattacactgagatgcggaaaaagattgaaatgctgaaaaaccattcccattttttcacgcagtttattaacattggttttgggggctgttatgctttcaccctcaataagtatttcgccttccgttggagtttccaaaaggttcaggcaccgaagaaaagtagatttgcctgacccggacgggccaataagcactatcttttcacctttgcgtacatgctgatcaataccttttaaaacttccaaatcaccgaaacttttttttagaccgcttacttttatcaatctgcagccctcctctatcgtatatcggattttctcaatttattttcaaatgcttttagcaatgtgctcactattttaataactacatagtaaataagtgcaattgaaagcataggcactacataatcataggttaaactctgtacttttctggcggcgcctacgaggtctatattggctatcataccgataacagcagtctcttttataagtacaataaattcatttcccagcgcaggaagtatatttttgaccgcctgaggtattattatgtaagtcattgtttggcgctgcgttagtcccagcgacctgccggcctcagtctgtccctggtcgatagataggattcctcctcttactatttcagcaatataagcgccgctgttaataccgaatgcaataacaccgaccatccatctgtcaatattgacattagcaaaaattatgaagtaaattatcaggagctgaaccattgttggagttccgcggataatatcaatatataaaccagagataccgcggaataatttattttttgataatctgccgaaggccattacaacaccaatgaccagacctaccaaaacagcaaaaaatgaaattaaaagcgtgtagccaagaccgctcaaaaaccattgccaccggttatccagtacaaatgttgaatacaaagaatttccgagctcagtaataaagttcattttatatcttccccctccctgtttaaactcttatatttaattatgatagcaaacttttcccaaaatagcaataataaatttgaataataatcaaaatttaagtatttttattattttatgtaataaatctttgattcacgtgttcgtttatatgacttaaacagagtttggaattgcatatttaatatatatatgttataattattaaattaaactcgaaaatttattttttaaaataaaataaaaattttaaataatattgaggtattatatgaagctatccggaaaatctgaactgatgtcagttctcaataaatataatttttctttttcaaaaagtttgggacagaactttttaattgatcagaatattttaaacaaaattgtcagcggttcaggtattaatgagaatacaaatgtactggaggtcggaccgggagcaggaactcttacaagagaactttgtttaaaagcaaagaaagttacagcggttgaaatagataaagctcttatcccaattttaaatgatgtaatgtccgattttgataattttaatctcattaacagtgatattttggagctgaatattaatgagttgataaaaaatgaattcgacaatgaaagctttactgtagtcgcaaatctgccttattatataacaactccaattattatgaattttcttgaaagtgaacttcctgtcaattcaatgactctaatgatacaaaaagaagtcgcagcccgtattcttgccgagcccggaacaaaggattacggtgctctttcggttgctgttcagttctatgctgaacccggaataatctgctctgcttcgcctcattgttttacaccgcagccaaaggtgacatcgactgttgtaaatctcaaattatatgataagccaaaatatgatgtgaaaaataaggaacaattttttaaaattataaaatctattttttcacagcgcagaaaaacactggtgaactcgttatcaggcagcccatatttggatcttagcaaagataaaataatcgacgttttaaaacaaatggaattgaatgagaaagtacgcggtgaaaaactaaatatagaacaaatagctgaactatcgaatataatttatgaaacacaggagtaatataaaatgaaaaaatatgttttagcaagcaaaaacaagcataaagcggatgaaataaaagaaatattaggtgaaaattttgaaattcagactatggatggggccggaataggaaatttagaaattattgaggacggtagtacttttgaagaaaatgctgaaaagaaggctattgaggtgtttaaagccacaggtttgcccactatcgcggatgacagcgggttatgtgttgacgcgctgtcaggaaaaccgggaatttttacggctcgttttgccggagaaaatgcgacagatgatgaaaatatagataaattgctgcttgaaatgtcagaagttaatgaggaaaacaggactgcaaaatttgtctgcgttatagcggtaattgataaaaatatatcagaaaatacacagtttttccgcggtgaatgcaatgggtatataactaaaaaaagagcaggaacaagcgggtttggttacgatccgatattttattatcctgaaaaacagtgcacattgtcagaacttggttcaaatgaaaaaaataaaattagtcataggtacaaagctctgaaaaaatttgcagaatctatatgaaaatgatataaaatgtttcatatgaaacaaaataaataaaaattcgccatatatctatataaattttaattttacgctattgaaaatataaccaggtgtgttataataaagtgacagtgaagaaggatggtacatattatgggaaaaattattgcggtagcaaatcaaaaaggcggagttgggaagacgactactgctataaatcttagcgcatgtttaggattaaaaagaaaaaaagtcttgctgattgatactgacccgcaggcaaacgctacaagcggggttggtataaaacctgaggacgctgaatattcgagctatgattttatagtaaatgatacacctattgaagacgttataatagagacagaatatacaaatatgtggatatgcccgggagatatgaatttggccggtgcagaccttgatttggctgaacaggataatcgtgagtataagttgaaaaaagcacttgaaaatgtaaaggataaatatgattttattattattgactgtccgccgtcactcagtctgataactctaaatgcttttaccgcctgtgatagtgtgattatgccaattcagtgcgaatattatgcgcttgaaggattatcacagcttactaagacaattaagcgagttaagaaaagtcttaataaggatttaagtattgaaggagttcttttaacgatgtttgacagtaggacaaacctatcagttcaggtagtggaagaggtgaaaaaatatttttcttcaactgtattcaatactgttatacccaggaatgtgagactgtctgaggcgcccagttacggtatgcctgttattgcttatgataaaaattcaaaaggagctgagtgctacaaaaaattggctgccgaagtaattaaaaaaaataagaaataatgaattgtttaacgtgaaacaaaatattataaggatgtgagcagatggcttcaaaatctaaaaaggggcttgggagaggacttggagcgctttttgatgacagtaagtcggagaagagcagcgaagggtttgattttttatccgatctatccgatacagaaatcgcagacagcgatagtataaaaatgataaaagttcgtgatatagagccaaataaaaatcagccgagaaaaacgtttgataaagaaaaattggaaatactgagcagttctatagccgctcacggtatagtacagccaattttagttaagccaaatataaacggaacttatatgatagtagccggtgaaaggcgctggagagctgcaaaattagcaaaaataaaagaggttccgtgtgtcatacgtgaattggacgagccggctgtaatggaaattgcattgatagaaaatctgcagcgtgaggatttaaatccgattgaggaagcggagggctacagacgtttgatggagacttgtgaacttacgcaggaagaggtagcggagaaagtgggaagaagcagaagtgcggtcgctaactctctcagactgaataatttatcagaaagagtaaagcaaatggtgattgatggaaaactatcacaggggcatgcaagagcacttttatctataactgatgataatgaacagtttgaattagccaaatttataatagaaaagggtttgaatgtaagacaggttgaaaaacttgtgtctgatacttcagaaaataaaaagaaaccaaaaactaaacaagtaaccggaatgatgaaaaaatatttttctgaggtagaaaatgacctgggttccagattgggcactaaagttaaaattagtgaaggtgcaaataagggaaaaatagaaatagagtattattctaaggacgatttggaaagaatattatttgaactaaaaaagtagttatatatgaaatatagtagatttactttaaaaaccgacttaaaaatttatacctaatttgtaaatttgaataatgtcctaagtaattatattaaaagaaggcaaaattgattctggacatgtttttagcttttatataagcaattggtttttgagaggaggaatgacattgggaaaagagaataaattaaaggaagatgttataaaatctgaaagttctaaaagtgagaaggttataaagtctgaaaagaatactaacccaaaaaagaagagtaatattgcaacatatgcagttgttatgataatttgtgttattattattattttaatagcagctatggctgataaccgcgaagaagaaataggaaatagggttatggaaactgaacagacaaacgcaagcttcgaaaatgaacttgtaaatttgcgtgaagaaaactataagctgaaaaaagagcaggagaaaaatgcttccaagatggaggaagagacaaagtataaagcagtgcttgaggtaatgagcaatatttggacaaaaataaatatgggagatacggaaggcgcaaaacaggatattatttctttggattcttcatcatttgatgatattcaaaggggatactatgaggctttgtgtaaaattttaagtattgacagcgctacaaagcagcctataacagaaaataacgctcagtaataatgtaaagatggaggataaaaatgttagatattaagttaataagaacagaaaccgataggatcaaaaaggctttggcacgaagaaaagaagaggtagacatagatggattgttagagcttgacaataagcgccgtgagttattgtttgacgtggaacaaaaaaaagctcagcagaatgtagtatctaaacagataccacagttcaaaaaagaggggaaggatacaaccgaaatttttgcccaaatgaaagaattatcggatagtatcaaggtagacgatgaaaaagttcgtgagctggacgaaaaaattcagacaataatgtatacaatccctaatatacctaatgagactgttcctgacggcgacaccgatgaggacaatgttgaaatcagaaagtttatggagccgacgaagtttgattttgagccaaaagctcattgggatataggcaaggatttaggtattctcgatccggagagcgcggcaaagattaccggtgcaaggttccatgtttataaaaagggcggagcgagacttgaaagagctattatgaattactatcttgatacacatacaagccgcggatatgatgagatatttcctccttttatggttcacagaaacagtatgctgggaacaggtcagcttccaaagtttgaagaggacgcattcaaagttgccgataccgactatttcttagtaccgacagccgaggttccggtgacaaatatgcacagggatgagatattaaacggcgatgacctgccccttaaatactgcgcatatacagcttgcttcagagcagaggcaggaagcgcgggacgggatacaagaggtctgataagacagcatcagtttaataaggtggagttagttaagttcacaaaacccgaggattcatataaggaactggaggagctgacagccgaggcggagtatgttcttcagggacttaaacttccttatagagtagttaaaatatgtataggagatttgggatttacagcggcaatgaagtacgacatagaagtttggatgccaagctacggcagatatgtggagatatcttcgtgctcaaactttgaagattttcaggcgcgccgtgcgaacataaagtttaaaaactcacctaaagagaaggctcagtatgttcatacgcttaacggcagcggagttgccataggaagaacaacagccgcaatactggagaattatcagaatgaggatggaacggttacaataccagagatactgcgtccgtatatgggcggcgagacagtaattaagccagactagtagtatagctgcaaaatggactttaaaaagtcattgttatggaagattaataaaaaccattgtaaaaggcttatcactgcttaaatacaatggtttttttatattttcttgttatacaaaaattggactatagattttttaagccattttatttttacgacaaaatgtttcacgtaaaacaaaattactcttttggttttgaatatatacagccgcagtagttttgcctgtaaagattatattgggatgaaagctctattgactttttaaatccctctttcttcttaaagtcagaaggtaaaaatgaaatttgatactcatcgcccagcatttggcctatttcattgattttctgtgcatttttaagaggacttatagtgagggtagtgcagaagtaatcgaaactattttcttttgccgccttagctgtagcttctagccgcagcttgtagcatttaaaacatctttcgccgccttcgcggcagttctccaaaccctttgaaatttcaaaaaacttttccgggttgtaatcagcgtctaatatattgattttatttatcgccggaagttcagaaatcagtcttatttgttcctgtttgcgttttagatattcttctttatttgttatgtttgggttataataaaaaaccgttatattaaaatatttatttaaatacgacaaaacatagctgctgcagggggcgcagcagctatgcaataacagcgattttgttgtattttcaccttcaattttattaattatcttatcaagttccagttgataatttatcttattcatgttttcacctgtagtatgtttaaatcattatatatgtaaaatcaccggtacattatattatatttttatataatccgtgatgttgttatcaaatattatcataggttaggtttcaattttcactgattcggttaaatagttcattggcttctttgacagttatttcatcgttatcaatcaagacctgaagccttgcggcaatattacttttcaaaaaagcacgatactcttcatacttaccaaattgattagccacatccgccggcataataccgttcataagcatttcttcgataacagattcctcggctcctgtaatcaacgaaagtaatagagttatattaccgctttcaacatcaactaacatatagttcactcctttctcaagtagtatattcaagttggcttatccttattaataaaatgtattatttttctttacacctatatcataacactttattgttaataattaatgaacgataggttaatattagttaaataattgtgaaaaattaatttataaaagttaattaaaagaacttgattttaatagaaaaaggtgttataataatatggttgtttgaataaagagtatgcgcctgtagctcagctggatagagtgaacggctacgaaccgttaggtcgggggttcgaatccctccaggcgcaccatataggaacggactttggtccgttcctatttttattctttttataccatttcgggaatatgtaacaatttttccatatcggtttcggctgataaagccatccctttatgtagaatcttatcaatatcattatgctgaaaaaagacaatataatctttatcaatgaaaccttgtggataaaggcatccaacataatcgtataatatagcaggatttttctttgttatttgctgtcttccgtaaatcataagcggccaagttccattctttaatacaacaactgtccctattggatagtatttcataatcataactcctttctcaaattatcaaataagttattaagcttaattttgcgatagattttgttattattcgatactgatataaccaaattttgtgaacgaaaaattttctccgccgcctcatttatatctctaactgttacatcatcgtacttcccaatcagttcatctatggagcaaaacggctcattttcaacaaatgtacgccatcctattaaaaaattcagttcatgcacatcgtcaagcaacctgtattgattgtcagtatagaaaaccttgtttgactgcatatcattttctgtcaagccgtattttgactgttgtaatatatcaaataccgccgtcaagctttcttcgatatttttgttatatacttcaaattcaaacgacattcttcccgagtatcccgcaaactcaatatttccgccgattgcacttgtaaatcctaatttctcccttaaaacctgtgacagcttggaggtgacgccgtatccgattatactctgcaaaatttcagccgcataacgatttacggatgctccgtctacatcaaatgaaatactaacatccgaaaatccgtcgcttgagccgtaaattctgtccgatgctgaactacgattacaaaattctttaacagtgtacttgggtagtataagatttgttatcgtatcaggcattggaagttgctctaattcatttgtaaagtgcgataaatcattacagctgaaatttccggttaaaaccacacagcagttctccggcacaaaaacgctcctgcgatattcattaatacaccttgcgctcattctgtttatatcggatatattccccattataaaagaacccttgggcgtactctcgtaatacttcatgtctgcctttgagtacaaggaattatacctgtcctcaatctgtcgcttgacaacacgcttctctgcctcaacctcctgcggccgccactcaaagcttttgaacacctttgatataagcaaaaatgcctctctgatttttgacggtgaaaccgtaatgtcaaggcagataaaatcagcgtatgttgccccatttagcgttgcgcctattttgtctgtttcaaaatacagctgcctttgaggtatgtcgcaaaggcgacgaaagaacatgtgctctgtcatgtgtgcaattccacagattttttccggtagctttcgcgcatatattccaatgttcacactgtgcaggtgttcattttttatatgctttactgtaagactgttatttaagatatttgtttcaaattttgtgttcatataaatatcttctttctctaaggtgtaacaatatttgcaggaatcgtccaccaaagcggcggagcaagagatggaagcattcttaaccctctgtatatggcatatcctgcagcagcagaagcgccaatgacaaattctttctccacaatgcgtttttgacaatatcactttttagtgcgtgtgcttttaatttattgtaattcataaggttcttttaacttacgtaagtaaaattatcaatatcacttgatttttacttacggatctgtaagatacaaatatgcaaatggatatctgcatatccgcaattacacattaacttgttgttaccggcagcattttaatgtgtattttcttttacaatcaatttacaccacgcctttcttatataacagattattttatttcttttcataatcattatatcagaaacaaaagtgacatagtgtgccatttattattatatcatatcattaatataacaacaatgttttatcattgtactaacacaatgtatctttttatataatccatttttggaataagccgatatagagttattgtgtccagattatttaattttgagattaatactgattattggaagtcgaaaacccttgattttaatatgtttttagcaaagttctatctgtatactcgcaccataccgtaacaaagttttctttgctgcgttttttattcaaaaatttacatatactttattacttcttcttttaaagaaaaacagcagattttgagagcctaggagttatcgggtaagtcaaaatatatttaaattattcacgctggccaagctataacaaatcgaaccacatacggcagattacctctgttgtttatgggttcgattttataataattttattttggctttataaggttgcaatgtttaaagccgttattatttgctgcaaattaatagaaaatttttatataaatttttacaccagataaaattgctcctcaaattataattctatatcaagcagtaacgcagtttcgattcaaattttgtatttaattttccgtcacaatcaaggctgcaaactagatttttaaattttacgctgtaactgtgaggattaaaacggttcggcaaattattaaatgatatgtggtcttcatagaattctttttttatttttccattacagtcaatatattttatgcatattccaaatcctgtaacaaccctttttgttcggccaatgtcataacaggccatatttgtattataaacatagcatagtatgaaacgttttaaatcgcagactgaaatatttttttgtatgcattgacacaagcatcggctattcatctcaaccgaccaggaattgctttccgcgcatatgacgtcatcacaggtgtttccgtatacgtatgctgtgttgtcaaacgtgacaggagtttgtttgcagcatggctctgagcaaacatataatacaaatgaaactgtgtaaatttgaccgggacacaacgttccaatataaataccactttgtgggttttcatttgttggtccgcatccgtcttttattgttgagcttgttttatagcataatccttgcggaatattatcatagacaactacattagtaagcgctgtactgcagggattggatattttcagagtgtagactatttcctcgcagagacagcacacggaggtcttgtcggcgtgctttgtgattttaagtccggcattaacaattctaacagagctgcatttacagcttcctaatccatatctgcagcaattgctgcagtctaaatagcaatacctgacgaaagctcggtttactatatcacaggatacagcatagtctacagacacgctgtatcttagttcggctgtttgacccggcggcagactgccgattgaaattccggtttgcagtgtttcctgtggttttggcgctggctgtatagaaccgggtattacggaaactccgggcggaagcgtgtcaaaaatttgaactgtgttcagcgatacatccgagtgatttgtaaactctactgtataggttaaggtatctcctatttgagcagttgatacgctggctcttttattggtactggtccaaatcaaacaactatcacatgcacagttgttcacacataatgtttggcaagggttagctatctgaactgtcttttgttcagttacaaatgattcgcatcccggtaaaatgatttcatcaccgtcacggcagcaaattagattgctgatgtctgttgctgaaccggggacaagcgatagtccgctgcagccgccgtaagtaatatcatacatacgaatgctattcgtgcaaaataatttatagtccagtttagcgtcagtattattacaattatttaatgctttgcaggaaaggtctgtcggcattgcatatttgtctcctttcaaaaaaagggaacgggataaccgttcccctttcataatttcctattttctaagaagctgtcgtaaaaccggaacagcacgaataattattgtcaatataatttgctacaaactgagctctgacaacacgttctgaacaaagtccaaagccctcgtccggcagaatgaactgtatgcatgaaacaagcacatctgaacaagttggtaatccgtgcggcggaatgacaaaggttttcataccacggggctgaatttcgttgtttggatctaattctgtcaaaatgaccgctaaagcaacgcgcctgtcaggacaaacatttagcagattaacatccagctgtaaaattcggcctgtgtcatttagctccaaattacctgcgtcaaactgtataaactcgttgcatccggtcagcggtatgtctatcggtgtagagcataagtcaacagggactacagactggcaatctacaaaaacagaaggattagcaaagctggcagtatttccctcattatctgtatatgaaatagattggtcaatatttttaatacctgaagtagtggcgttatgcttaatagtaaatctaaccgttgcgctttcggtagaagttgagccaagctggctaatgttccatcggaatgatgttcctgtcagcattgatatagtgcccaccgaagctgttggagtgccggtaataataaaatcaggatttattacctcatttattactatatcagttgcaccggggactgatatatttgccgctaaatctgcaaataattgttccagttcggagctgtccggagcaatagaaacatgtgttatatcggggtctgacgcccaattattcagagcgtcaatatcgattccgccattgccaacgagaccaattgtgtaaattgtaattcccatggcttttgcagcggcagcaattggagacggatttggaccggttgtggtttcaccgtcagtaaacataacaatgacgcggttgttggttgatgagctcaaaagcgacgttgcctgtgtgaaagcgtcgccatggtttgttagtccgtcggcagtcagtgacgctgcagctgatttcaaatttgatacagaagtgataagtccggtattttgaaccgccgtatctgcaaaactaactataccaatacggctgccggaaccaatttgaccgggacctccgtcggtagcgtcggagataatatctataaaagtattaacgccggttttcaaatcagcgagcggctgaccttccatacttccggaacggtcaaggactaaaacaatatctgttggattggtggtgatatccggtgcggcggtgattccaattgtaacatttaaagaaccctgacaattgatggagctaacgccgcctatagatttatttgaactaattattcccatttctataacctaccttataataatttgagcattacgctcaatatcaatatatgtcgaaaaatcatatatgttaatacattacggcaggtgtaattcatataaataataaaataaaagtatgtgaatagtgagcgtcggcaggccgcatttatgcggagcgtaaggcgagcaacgcgggtaggatataaaactaaaagtttatactgatatactattccacgcctacgcacctaacgaggtggtctgcgaccaccctaccgaggtttgaaaaccgcttcaacaaataaattgtaaaaattttaaaaaatatcgtgtactcaaagtatctgcaaatatttataagttataatgctttatataaaatattaaaggggtgtttctatgcaattaaatcaaattgttgccaaacgtattcgtatgctttgtgtggaacaatcaataaaccaatatggattattcttaaggagcggcgttcctatgacaacaataagttcagttctgcactgtgtacatcggagtgtgacgctgcaagttttatatgaaatcagcgagggatttggtataagtcttatagacttttttaactctccgctgttcgagcgtgaaaatatcgatgattaaaattgtgctctcagcaaaaaataaatttaatataagtttttatttgtttatttttagtgacttttttactgatatatgctatactgttattataatagttttaaaaaattggtgcagtatatcagaattgggggcgcaggatgttgaaagggagaaaacttttaaaaattaacctgctggtaagtattatattggtatttggcttcattataacttcatttttgagttataacgccaattacagaacctctctcagtaatgtggagcaggtgtcgtctctgacggccgaaagtatatattatcagctgactactatgttcacacgtcctgttaacatctcgcttactatgtcgagagacactctcctggttacccagcttaatgaagaaacaaagcagatgaataatgaggaatatatctcaacactgaaaaattaccttgagacataccgcggaaaatataattttgactctgtctttcttgtctccgaagcgactaaacggtattataactttaacggcgtagaccgcgttctgactgaggataatcctgaaaacgtttggtattatgatttgatgaaaagcgggcaggaatattcgttaaatgttgataacgatgaagttgacggcgcagacaacgccataactgtttttgtaaactgcaagatatacggagagaataacaaggttttgggagtagtcggagtaggaataagaataagctatcttaaggactttttgaagacctatgaggaaaaatatcatctgagaacctgtttggtaaatgaggacggcataatcgaaatatccactacgcatacaggttatggcagaaccgattggtttagcgaatacgacagggaatctatacgcagtcaggtgcttgactggaagagcgataagagtaatttagaattttggactgaaaacgaggataacagtcaggaaaaaagttttgtggcttcacgttatattccggagctgtcatggcacttggtagttgagcaggacaccggaagtataatcggtcagatgaaaataagactttatttgacagcagttattattatcggaatcattattattgtattgataataataagtttagtattatttaagtttataaagcaaatatcagaactcatggaggaacgtcaggcaatatttaaaaaggctactgaggaactttatgacaatatttatgaattgaatataactaaaaatggttatgcaaacgctcccacaaaacagtactttgagagtttgggcgcaaagggtctgccgtataacaaggcgcttaaagttgtggctgagaagcagattaaaaaagaatacagagagggatatattttaacgttttcgcccgaaaacgtcattaaagaatttgagagcggaaataatcatttaagttatgactttttgattactcagaatgatatggactatttttggatgcgtattgacgcatatatattcctgtcacaagaggataactgtattcacatgttcacatatcgtaagaatatagacgcggaaaaacaaatagagcgtcgggcgtcgacagatgagatgaccggattccttactaaaacggcgactgagcattctattatgtctgaattatctgaaaagccggaggacttatatgcgttctttatctttgacatagataattttaaacaggcaaacgaccaatttggtcactcatttggggattactgccttaaagagtttactgaggttataaggaaccatttcagggacggtgatatattgggacgtatcggcggagacgaatttgtggcgtttataccgattcctgataccagatgggtggaaagtaaagcgagagagttatcagcagctttaaacttcaactgcgtaagagaggaaaaggagtggaagctgtcctcaagtataggcgtgtcgattgctccggaagacggaaacgactttaaaacattgtatgagaaggcggacgctgctctgtaccgtaccaagcagagaggaaagaacggatacactatatattaaaagcagaataaagaggagactgccgcaagtttgggagattcatctaatttattttgacggtgtataataataggactttaaataatgatggtgacccacgaaaaagttagatttttggtctaactttcgtgggtcacatcattataaagaagttttattttttattgcctatatgcaagaaactatataaatttttttattgtttttacgctgaattatacgtttattaataattaataggctgatttatttatactgtaatatgaaaaacaccgtatacgttcatgttgtatttccaaatagttctgacttttggtatacaatttattgaaagcataaggtgtttagtctattgttttatattttaaggacaagttaatttaacagaaatattatagtgtctagactgcgaataaaaattttaaggattatttctatatatttctgaatttccataactgctattattgtctgttatgtttaaataattttttatattccgctggcatcattgagttcaaacaggttgccttcagggtctctgaaataggtgcagcgcataccccaatcctcaatagtctgtggttctcctaaaaactgtactcctgcctctttcagacgtttatagtccttttcaaggtcatctgaggggataacggccacaactgtatcaggctgtgaattgcagtcgggctggttatagcctttaaacatactcatattttctccgttaaaaattgcaaagcaaggcggagcgtctttttctacggcaaaagaggtataaggaccgtttctgtcaccccataccggagttaagccgattttatctgtgtaaaagtcaaaacattctccataattcttccgaaccaaaattctgattgtagtattatcaaaccgcatttgttttacctccaatatattttttatttagatattagttaaagctcgtcctacatatttcatgatttttatgtgatacctatgtgcattggtaattttcgcatattgtatattttatatcataagtttccgctgaatatttttataaagccaaatagaaaaactatattttggtttctttcctgtcagtaaataatatgttttcgaaacgccggggaattgttgatttataggttatgccattctccttgctgttatgagcaaacaaatgatatgtatattgctttttcagcattgatataccggtataaataaggcaataaaatttattactgccaatatccttgttgaaatataggttatttcataattgcatttaacataaatttttgcagaaacaagaagttattataattaaatattttggcggcagataaatttattattcattttcttttttatataaatagtaaaatacagaactgcggttcaattatattagtctttaaaattcattgacagactgattctgttctttttggtgtcaacatcaataatttttacctgaacaatgtctccgatagaaacaacgtcggtcgggtgcttaacatagttttcggacagctgggatatatgaacaagaccgtcctgatgaacgcctatatccacaaaagcgccgaaatcaattacatttctcacagttccggtcattatcatgccgggttttaagtcgtctatactcataacgtcacttctgagcaacggctgttcaatatcgtcacgcgggtcgcggccgggtttttgaagctcttttattatatcttttaatgtggggactccaatatccaacttttgcgcaagacttttaaggccgtgcttgtttactgcttcatctaggtttttcagaccatcgctgcttatatccttgaaaccgcactcagaaagcagcattttggcggcgtcatagctttctggatggaccgatgtgttgtccaaaatattttttccgtctgttattctgagaaatccggcgcactgttcgaaggctttaggaccaagtttagacacttttttcagctgttttctgtcagtaaatcttccgttttcctcacggtaactgactatatttttggctatagccgagcttatgccggaaacataactgagcaaaggtgccgatgcggtgtttaagtcaataccgacgctgtttaccgcgtcctcgaccacgccgccgagcgcttcagccagtcgtttttggttcatgtcatgctgatattgtcctacgcctatcgctttaggttcgatttttacaagctcagccagcgggtcctgaatccttctggcaatagatatagcgcttctttgggtgacgtcaaaatccgggaattcctcggttgccagttttgaagcagaatacactgaggcgcctgcctcatttgttataagatatttaacttttgtcccgggtatggtctttaaaagttctgctgtaaatatctcagtctcctttgaagccgtgccgtttcctatggaaatcaagtccacatcatgtttttttataaggtttttaataaattcggcggctgattttttctgcgcttccgaatgtgtgatataaataacccctgtgtctaaaaccttgcctgttccatcgactactccgactttacatccggttctgtaacccgggtcaaggccgataaccaccttgtccttgataagcggctgcataagaagattgtgcagatttgttttaaatatttttatcgcttgttcctgagcgttttcagtcagttcgtttcgtatttccctttctatagacggggcaatcagtctcttataagagtcgtccacagcggcgtcaaaatatttgtgttcgccgccgtcaagttctttccgttttaagtaattgattattttctctgtgtccggtatgattgatacatttaagactttttctttttcgcccctatccattgcgagaaccctgtgcggagctatctttgataccccttcagaaaaatcataatacatttcatatactgtctcggcttcagggtctgttgccttagaagtaatcacgcctgtttgaaaggttatgtctcggattttttttctatgttcagcattgtcggatatttgttcggcaataatgtccatagctccgttcagagcgtcttcaattgataatacttcattttcctcgcttacaaagtcttccgctcttttttcaagttcttcatcactcagcatttgtgagtatatcagcactgagaggggttcgagaccttttgctttggctatagtagccctggttttcctcttgggtctgtatgggcggtataaatcctcaatctctgtgagcttttctgctttatcaattgcctcagccagttccggggtcagtttgccctgttcctcaataatgcgcttgacgtccgctttgcgttcctccatgtttctcagataactgagcctttcatttaagtcgcggagtatttcatcgttaagctcaccggtggcttcttttctgtaccgcgaaataaatgggatagtattcccctcgtcaattagcttcacagtgttttctacttgccaagcgttaagtttaaactcctctgcaagcttctttagtatatccatgtatcaatttctccttaatatctatattttaaaacgaaatctgcgaactgtcaggtagactgtcaaggaccccgttttcgccgagaacttctataaccgttttagttattccggctctgtttttcaaatcttcctttgacataaagtctccgtcttcacgggctgacgctattgcttcagcagcgtttgttccaactccggcaaaggcgttaagcggcggaagtatttttccgtcctttttcccgaatttatatgggtggctttcgtaaaggtctacgggcgcaaagtcaataccgcgctcatacatttcctggcatatttctaatatagtaagcagatttttctcgtttgcggtggccgagttgcctttaatttttatcttcttcatttcctgaatgaccttttcttctccgtgcgccattatagcggcgtcaaaaaggtcggctctaactgtaaagtaggccatatagaattcggcaggatagtgaactttgaagtaggctatcctgaacgccatcattacatatgcggcggcatgagccttagggaacatatattttatctttttacaggagttaatataccattcaggcacgttattttcacgcatagcggcttcaaagtcttccggcataccctcttttgcggctctgccctttctgacaaactccatgattttaaacgccatgctgggttcaagcccatggtgcagaaggtataccataatatcgtcacgcagtcctataacttcggatagcgttgcggttttattcttgacaaggtcctgtgcgttgttaagccaaacatcagtaccgtgggaaagcccggatattataagcagttccacaaaggttgtcggcatagtgtcaaccagcattccgcggacaaagttggttccaaattcaggaacgccaaaagttcctaccttactgtcaatctgttcgggtttgatgccaagagcctcagtgctgctgaacaaactcattgtttctttatcgtcaagaggaatctccaaggcgtttatacctgtcaaatcttccagcattcttattgttgatgggtcatcgtgtccgagtatgtctagctttagcaggttgtcatgtatagaatggaaatcaaagtgtgtggttataatgtctgaatcctttttgtcagccgggtgctgaacaggagtaaagtcatgtatatccatggtcttggggcacactatgattccgccaggatgctgtcctgtcgttcttttcacatcgacaataccctttgagatacgttttagttcagcgtcaggggccactatttcctttttctcataatattttcttgcaaacataactgccgtcttgtcggcaatggtgccgatagtaccggctttgaatacgtacccgtctccaaaaagttcgccgacatatttgtgagccgtcgcctgatattctcccgaaaagttcaggtcaatatcgggaaccttgtcgccctcaaagcctaaaaacgtttcaaacggtatcgtaagaccgtcttttctgagcggcgcgccgcatttcggacaggtcttattcggcatgtccataccggtggggtattcgccgttgtcataaaattcactgtacttgcagtccgggcacacatagtgaggacagagcgcgtttacctctgttataccggacaagaatgcaacaaaggaggagccgacacttcctcggcttccaactaggtagccggcgtcgtttgattttttaaccagcttatgcgcaatcatatacataaccgagtatccgtatttaacaatacagcccagttctctctccatgcgctcctcaactatttcaggcaggttgtcgccgtagatttcatgagccttactgtgacacatatcaatcaaatcctgctcacagttttcaatggtcggagggtatgagccgtccttaacaggctggatatcctctatcatgtcagctatttcaacagtattgtctattactatctcttctgccctgtcgccaagataactgaactcgtccatcatttcggcggtggttctcaagtacagcggggcctggttgtcagcgtcttcaaagccctgagcgcccatcagcacgcgcctgtacatctcgtctttggggtcaagaaaatgaacgtcgcaggttgcaacagttttcctgcctatcttgtcgccaatgctcacaatctttttgtttatctcgattagttcattatcatctctaacttgtccattacgcttcataaaagcgttgtttcctaatggctgaatttcaagatagtcataaaattttgctatctctgccagctcgtcttcggatttcttatttataatagcccggtaaagctcgccggattcacaggcagagcctactataatcccctcgcggtatttgtggagcagacttttgggtattccgggcttcctatagaagtagtccagatttgacctggatattaactggtataagtttttgagcccgacatagttttgcgccagaagtataatgtgatatttcctggtcttcacgaccggattgtctttatccagttcgggaatctcagcttcagccgccgccgcgtctttccatgcggtcatatccatcatttttatgaagcagtaggcagttgccgtggcgtctgcgaccgctctatggtggttgttaagctcaacgcccagcctttggcacataatatttaacttgtgattgttttcatttttaaatatatttctggacatttccagcgtgtccattgttttattaggaaaatataatttgaggcggcgcgcatttgagtatataaatcccatatcaaattttgcgttatgtgcgaccattataccgtcgccgcagaatttttggaattttggcagaactttatcaatcgtgggtttatcctcaaccatttcattggtaattccagtgagttctgtaatttgctcagatatttccatttcgggattaacaagctgtgagaacttatccactataataccgtctctgatttttacagcgcctatctcagttattttgtcacggtctgaactcagaccggtagtctctaagtcaaagactatgtatgttcctttcctcatttcccttatgtcgttaaggcgtttggaatctatgtcgtcgattaaatagccttccattccatatatcattttcagacctttgtgagcctttgctgcctttctggcgtcagggaatccttgggcaactccgtggtcggttatagcgacagcgggatgcccccagaaagccgctctgtcaaccaaagacccaacggatgaaacagcgtccatagcactcattttagtatgcatatgaagttcaacgcgctttttgggataagtgtcttgtctgacaggcggagccggtatcagcagtgcagaggtcactttgattacaaaactgtgaagatactcgtcaaattcatagtttcctgctaccttgagacggttgccctctttaagcattccggtcagggctttcattttttcagaatttccgaaagcgctgcaggtggttgcccattcgtcatcacctatagaaaattttattgaggtgttggaacggttaccgcggactatgtctctgctttcgaaatcaataatttccccttcaacaacgcaatattttgtttcttcggtcagtttaattattggcgtcgggttttcatctatgtattttccgaatgatttcggcgattcggacggagccgccgccttttcgggtcttctttcctggatagaagcggccacaagcttagattctaactctgattgccgcttgagatattcctctcggtcggtttcggcaaaacaaagattaaccgtaacgttaagatcgattccaaacgcaatatgctcacgcataaaggctgaaaaattcatgttattcagagcagactcacagccgttaatatttttaataatgagagtattatcattaagctcccctgtggctcctattaaaaatgcctttccggcatcatggcttgcgagaaaagcgtcaagcagataagaaaaatattggtctgaaaaatcaagaccgggatacttaacaaatatttcaaaatcgttcagaccatatgattgtttggtcatgtttataaacgcttttgtttccgggattggcagcagattctgcccttttaggtaaagctttatattattataatttgtatctatattacaggatactatttcatagctagacaaaagcgacgcgtaattttcaagcacggtcaccctgtcaaaaatatccagtatggttgggctcattttatcatcttccttttaaaacttcattttattcggttaaaccattttattaatttcatcaatcaaacatggaataatctcgtcttcactgacctttctgattatttctccgtgcttgaacaatacgccgcagccatcgccgccggctattcctatatccgcgtctttggcttctccggggccgttgacaacgcagcccataactgcgactttcagatttttatttattccttccaccgcgtcgttgacagcgttggctatggaaataagatcaattttggttctggcgcatgttgggcatgaaactacttcgatataatcttcgtctaagtctaaagctctaagtattgatttggccgcggatacttccaaaattgggtcgtcagtcagagatactcttatagtatcccctattccgtcaacaaggagcgagccaatacctacggaggattttactatcccctgtttaattgttccggcctcagttactccaagatgcagcggataatcaaaagtttggctggcaagcctgtatgctctgacagttgccgcaacgttggaggatttcattgacagcacaatgttatcaaagtcaaaacggtttaggatttcgacatgccgttttgcgctttcgaccattgctttcggcaaatctccgccgcacttatcaagcagacctttttcaagtgagcctgcattcacaccgatacggataggaatatttttggcggccgcggctttggctaccgcttcggcattttcttcaccgcctatgttgccgggatttatacgaaccttgtctattccgcgctcaatacacattaaggccaggcggtagtcaaagtgaatatcggctaccagcggaacgtttgttttattctttatttcttcaatggcttcagcgctctctttgtccggaacggaaaatctaactatatcacagccggctgaggccaaatcgttaatttgtttagttactttttctatatcataagtcggaacgtttgtcattgactgtatagcgaccttatttccgccgcctattgtaatgtttccgattttaacaggttttgtatgtattgaaatttcttccataataaccaccccggataagtttttttatctatatattttatcacaacggcagtacatattcaagtaaataaaatgcgctgatttaattaaattttagctcattgcagggcattaaagtaataactgcatataattaaacggaggggataataatgcgaggcagaatcgaaagtataagttcagtgaaggataggaatcagattattacagttgttggaaacggcgagcataacggaagactgagtatgtttgaaaaaagagataaccggtggataaggctgttttcgtatccatgttcagtgggagcgggcggaatagctgatataaaaagagaaggtgataatataactccgtcaggaatgttcacattaggaacaatttttgggtgcgcggataatccgggaacagagaataattatctaaaggtaaatgacgatatgtattgggtcgatgatttcaattctgaacactataatcagctggtagatatagggaaaggcaaagttgattttgccagcgccgaacatttgtcagattatcctattcaatataaatatgcagttgctgtagactataatattgatggtattccgggcaaaggctcagcaatatttttacactgcaccgataatttagaaaagggaacttcaggttgtattgcggtagacgaggaagcaatgaaaaagataataattaatcttaaaaatgacgcggtaattataataatgggataaaaatatacttttaaaatttattctgtaactttaatttgtgctaataaaacggtatgtggaatattgagtataataaaaataaaatttgggtttaaatagcagtgtgccgtttaggcagcaaatatgttcggatgctgaaacaatgcggaaataaggctttaaggtgataattagttaagacaataagaaaataagacaattaagatagttatatattaatagtggaatgataactttataaatatataaaaaatacatagaaaaagacaattaaataagtccttgccatttggcggtcttaatatattttatgccagcaaagcaggtatgtactttgtttttttgttacaattagattataattattatacagcagtcaattattttcactagattaagttgattagcggttttggccgccttaaaaatattgatgttacttagtacagaaactaacactaaatatagtaattataaaaactattggtttaatttatgattgacaaatttggcataataaaagagccgctaaaattttagcggctcatatcttttaacttaaatatttttagtgagaaataatattctcagtatctttatcaaataagtgaattttatttgcgtcaagagcaaccgtaacggtatccccgtgtcttgctgtagaacgcggattaactcttgcagtaaagtcatttccggcaattttgaaataaagataagtctcagcacccatcatttcaaccaattcaatatttacctttgaacagcagtcaggaacacttgaaatgaatgcagggtcgtcataaatatcttcaggtctgatacccataataacttctttgccgttatactgcttaatttctgatctgccgcccttgccttcaggaagtttaattgagaaatctccgcatttgagatatgtgccgttagaagcgcagtcaacagtaacgttcaagaagttcatctgaggagaaccaatgaagccggcaacaaacatgttgcaaggatattggtataggttagacggtgaatcaacctgctgaataataccgtctttcataacaacgattctggtacccattgtcatagcttccgtctggtcatgcgttacatagataaatgttgtttgaagcttcttatgtattttaccaatctctgttctcatctgaactctgagttttgcgtcaaggtttgaaagaggctcatccatcaagaatactttagggctacgaacgatagcacgtccgagagcaacacgctgtctctgaccgcctgataaagcctttggctttctgtcaagcaaatgctcaataccaagaatctgagcggcttcaataacctttttcttaatttcatcctttggtgtttttctgagtttcagaccaaacgccatattttcaaatacagtcatatgcgggtaaagagcgtagttctggaaaaccatagcgatatctctatcttttggaacgacgtcgttcattaacttatcgcctatgtaaagttcaccctcggtgatttcttcaagaccggctatcattctaagtgttgtagacttaccgcagcctgaaggaccaacaaagattataaattctttatcttcgatttcaagattgaaatctttaacagctgtaaatcctcccgtatatgttttgtaaattcctctaagacttaaacttgccatttttaaatgacctcctgattttatatttgttctgaatcaatatgtatcacagaatttaactacctcattattctaacataattgtgagaataagaaaagggcgtatttcaccaaatttgaaattaagattttagtgattttgcatagctatttttaagacttaaatactttcgggtaaatatatacaaatttttgggtttcacttgatatattttgtctttgatagtataatgctaaacatgaaataaaatgctgtcgatttgctcacaatgcctatcagaagctgtttttaaaaatttatacggagttgatttcaatgataaaagtcggaatattaggcgctaccggatacgccggaattgaagttgtcagacttttgaccgcgcacccggaggcggaaatagtgagagtggtttcgcaaagttttgtggggcagaaaatctcggatgtttatcagaatttgaaggggatatgcgatttatgctgtactgcgctggatgttaacgatatagccggcagttgtgaccttgtcttcacagctttgcctcacggcgcttctaagaccgttattccgtcattgtatgaaaagggtttgaaaatcgtggatttgagcggcgatttcagatataacgacccggccgtctatgaaaagtggtatggagaacctcactcggcgcccgaggttttaaaggaatcggtttatggtctgtgcgaaattcatagagatgaaataaagacccatagactgataggtaatccgggctgttacacgacttgttctattatgggacttgcccctcttgccgcggccaagattgttgacacaaaaaatttgataattgacgcaaagtcaggagtgacaggagccgggcgaagtgcgagtctgcctaatatattctgtgaagtaaatgaatcgcttaaagcatacaaggtggccacccaccgccatacgtctgaaatagagcaggagctttcaatattatcaggcgcggatatagttctttcatttacaccgcatctcgttccgatgcagaggggtatttttgcaacttgttatgccaatcttactaaaaagatgacaacgggtgaagttttggatatttataaagaattttataagggtgaagaatttgtccgtatctatgacgaggggagcctgccggaaataaagcatatagccggctcaaactatgttggtataggagtggttgttgacccgcgtctgaaccgtgcggttgtagtgtcatgtatagataatctgattaaaggcgccgcagggcaagcagtccagaatatgaatttaatttgcggtattgatgagggaacaggacttagggcagctggaatgtatttataaagattgggggattagaaattggaagaacttataaaaaaggccggtatacttgttgaagccctgccttacatacaaaaattgaacggaaaaactgttgttatcaaatacggcggcaacgctatgataagtgaagaactgaaaaacaaggttatggaagatataaccttgctgaaatttataggcctgcacccggtgctggtacacggcggtggtcctgatatctcggagactttgacaaggtttggaattcaaagcgagtttgtaaacgggttaagagtcaccgatgacgagaccatgcgcgtggctcagatggtgcttatgggaaaaaccaataaggaaattgtttcgctgatttcacaaaaaggcggcaaagcattgggtctttcaggaattgacggagagctaattgaatgcgagaagcagtatgccaatgttgacggcaaaattgttgatatcggttatgttggaaagataattaagataaaccaaaaagttttggagtttttggctaacgacgactatatccccgtggttgctccgctgggagtggataaggaaggccgaagctataatataaacgctgatacagtggcaggcgcgatagccgccgcactaaaggcggaaaaacttatgcttttgacagacaccccgggaataaaaagctcgccgaccgctgatgatataatatatgaaattaaccaaaaagaaatatataagatgattgaagccggaaccattgccggcggtatgattccaaaggttaaaggcggacttgaagcattggcaggaggggtaaataatgtacatataattgacggacgtataccgcactgtctgctgcttgaaatatttacagacagcggtataggaaccatgataacccgataatacaagccgtatatgggagctgaatagagggatagtatgaaaaagatgttattagtatcaatgtttcagaacgttacaggtatactgaaaaaagtggaacctgaattaaagaataaaactgtgacatatatccctactgccagtaaggctgaaaagttaggtttttttgtaaaaatcggcaagtggacattgagacgattggggctgactgttgatgagctggatatatattccgcgtcttatgagactgccaaaagtaaactagaaaaaaatgatattatatatgttgccggcggcaatacgttctacttgttgcaggaattaaaaagaaccggaaccgataagttgttagccgatgaaataaacaaaggcaagctttacataggagagtcggcaggcgcaatacttacggcgccggatataggttattctgcagaaatggataatgtgggaaaagcgccggatctgaaagattattcaggacttaatgttgttgatttttatgttgtgccccattataaaaattgggagatggggaaagcggcacagataataattgataaatactcagaaagtttggatttaaaagttattaacgataaacaagctatatttattgacaatgacaaggtcaaaatattagacaaatagactgaccgcaaaggtgatcgccaaatgaaaatgcctgaagaaattgaaccatttatgtttgctccatgcggaatgaactgtaaagtttgttataagcacttggctcataaaaattcgtgcggcggatgtttgaaaattggttctgaaaagccgaaacactgccgtgtatgcaagatcaaggactgcgcaaagaataagggcgtaacatactgttttgaatgtgcaaattatccttgtaaacaggttaattatttggagcaaagctatataaaaaggtatgaggttagtttaatggaaaataccagattagttaaagaatgcgggatagaatactttatgcggcagcaaaagaataaatatacctgcgcaaagtgcggcggtataatttccttacatgataaagagtgcagtgagtgccgaaatagcggcggcaattagttgcagtacgtttctaaatggtaaagaaaagggaatgagatcatgtcagaaataaaagtcagcatagtaaatttaaaaaagcaaacagtatatggtctatggaaaaattcaaatgacagcacagtttcaaaagatataaagaatctttctaaaaaatatcatataaaggtgtcgtcgccgggcagtaaagtgttcccctatttagtgctgtcaaggaattataacgaactgagtaaggattttgaaatgtttgtgggaggcacaatagacaaaaaagggttagaatctttaactattccaaacggtgaatatgccaggataactataaaaccgaaactgggatttttgtggggattggctattggcgaagcaaagagatatttctataccaaatggctgcctaaaagccggtattcggcgctgaatatggaatatgaataccatactgagaagagtgatggaaagtctccggaaatagatatattttttgctgttaagagaaaataacagtaatgcttaacgccggaatagccgaacaataaccgcaaaggttttatagaaatagcacatttccgggaaaaagcgtctttggcagtcacgtcttgttttctcttagtccttgatacgcgcttcttatatattattgtccagcagcaaaacacggtaaatgggaagtgaaccatatctgttcctgttttttgaaaatattaaaatgcttttttatgtatattttcaatctgctattttctgttgcggcacagatatttataataaccgaaacgtgatactttttgaatcggtatacttttttgatattacacattttctaagattcctataaaactgaaattatatacatactttgcacttaaaaagatttgttttgtaatattaattctttatatttttgtagttttttaattcgtattcagcattacaaaagcgttttctatacctcaaaaaccgctttgactatgcttatcatatttgttaattcaacgatacgtaccgatattgttgattccaaatttttttactgtttcataaataatttttttgcctgtccgtacaatttttatagatgcagttttatattgtttgtcataaactgcttgttttataaaccggatcgaattttttaatcattctatactttctatactttgtaattagattattgtactatatcccaaataagtctttatactgcctaaaaaatttgaattatttcaaaagtgatgaacttttatttaggtgtacttttaatattcaacaatgaagacgagctgtcaggaacttacagcccgccttttgattatatctcgaaaataaaaatttaaataattttgcatatataaacccgagtgttcaggaaattaatctgtttacaaaaaataacgcgcttgagttgataaaatatataaataatatcattgagcgcctgattaatcaatgataaacatattattttaatgcgcgctgttataataattatagatttagcttatcaaatgctgctgcaaatggattgttggagtcgtcttcctttttgttttgattgcgaagataattctgcacatctcttttggaagcgccgctttgtcctctccgctccttgaaggcggagtatttttccctgtagccgcaggaacagtagaaactctttttttcaccgtcgcctctaagctccattttcttatgacattcaggacagcgtgcgtttgttattatgctaactgaacggcggtaaccgcagtccctatcctggcagaccagcacttttccttttttaccattgacctcaagcaaatattttccgcagtcaggacaggtctttttagtcatgttgtcatgtttgtattcggcgctgctgtttttaacggtcttaacaaggtcggcggaatacttttctatttcagcaataaatttttgcttttgggttttgccttttgagatcttttctaactcctgttcccacttagcggtgagcaggggttcttttaaatccggcggcaccaaatctataagctgaacgccttttgaagtaggaaccatgctgtttccctgcttttctacatagaatgaggagtataacttttctattatatcggctcttgtggccggggtcccgagacctccgcccaaatattctttcatatttttgtcgtttacaaaacgggagggattttccatagccgaaagcaatgttgcttccgtatatcgtgccggaggttttgtcttgcctgatttgacgaatgtgtttttgcagataaattcatcgctatacttcattttgggaagtatttgtttcctttcctgtgcgtcagcagtatcctcatcatcaaacgagtagtctgaggaatatactgctttccagccaagagaaacctcctctttgcccccggctgtaaacttttcacttccgcactcaaattcagctttgatttgtttatatttatacggacccataaaacaggccaaaaaccgtttgaccacaagattatatatacgcttttcttctgttgagagcgaaatcataggaaccttttgttcagttggtattatggcatggtgatctgagaccttgctgttatttatgcagcttttgttgatttttaatttcctgcggagtatatcttcagccgccgcctttgtatcgccgatggttacagcacgcagacgttcatttaacgtcggaactatatcgtcagtcaaatagcgtgaatcagttctagggtacgtcagtgccttatgctgttcatataatttttgcattatgttgagagtttgtttcggagagtaaccgtagagcttgtttgcgtctctttggagttcggtcaaatcgtataacatgggcgcatacgtctgtttgtcagagcttcttaaagatgtgagcttgaacggtttgcctttaatctctttggatattctttctgctttttcacggtcaaatgtagataatcccccgtctttgctgcgccaggaaacaaataatttgccgatatcggcttctattgtgtaatattccttaggaacaaatttctttatctcattttctctctgcactaatagtgcgagtgtaggagtttgtacacgtccggcggataactgagcattaaacttgcaggtaagggctctcgtaacatttaatccgacaagccagtcggcttcagcccttgcctgggccgccatatagagattataatactccttgccgtctcttagtttctgaaagccttcttttattgctttatcagtctgtgacgatatccaaagtctttttattggttttttaactccgcttttctcaattatccagcgggcaaccagctcgccttcacgcccggcgtcggttgcaataataacggagctgacctctgagcttcgcagctggcgttttacaatgctgtactgttttgaagtctgctttatgacctcgagtttcatctttcccggcagcatagggagcgtttccaggctccaggttttgtattcatctccgtaggcttccgggtcggccaaagtgaccaagtgaccgagagcccatgtcactatatatttgtctcctataaggcatccgtcagattttctgctgcactttaagacccgtgcaagttctcttccgacggatggtttttctgctaagacgagagttttagacatatgttttcctcctttatggggaattattgattgaaattttgtatcataaaattataccacaaaatttatattttgtacatagccggttaaattgacaatagagttaaaacggtgtagaataaataaaatacgagtataattatctattatgatgttaaatatttttataagagaattaggcaggaagggatgatataatatgaatatagaaaagtttgcatattatggtgataagaaaattaaaataaaagatgttccaacctcaagcaagccatatgatgtggagaaagaacggataattgacgaaaccgaaaaaatgaaacctcagatagaagacttgcaggagaaactctatgccgaagccaaagaggggcttataattattattcaggctatagacgcggccggtaaggacagcactattaaacatgtgatgagcggagtgaatccccagggcgtgtctgtaacagcgtttaaacagccctcatctgaggaacttgctcacggttttttgtggcgggcggaaaaagctgttcctagaagaggttatataggaattatgaaccgttcatactatgaggatgtgttggttgtaaaggtgcataatctgcaaaaaacttataaaatgcctaagcggtgcgtagatatgcccgccgcagatttctttaaaaaccgttataagcatattagaaattatgaggaatatctcagtgacaacggatatagggtaatcaaaatatttcttaatgtctcggctgaaaagcagaaggaacgtttcttagagcgaatagacaacccagcaaaaaattggaagttttctgctgatgatttatctgaaagagcgttgtgggacgagtatcaaaaggcctttgaggatatgataaacgaaaccgcaacaaaaacatcggaatggtatgtgctcccggctgatcagaaatggtttacaagatacttagtttcaaaaataatattaaagacgcttaaaaaaatgaaccctaagtatcctgaagtctccaaagaagataaagaggaacttgaggagtgcagaaacgaattattggctcaaaagtaagttcagaaatagtaataacaaaaccgcaccggaactgcagaatagtccggtgcggtttttatataatattttaaggcttgtttataactagtcgttaagatttttgtcaaggatttcaagctgtttcttaatgtcagccggaagtctgtctccaaactgagcaaagtattccttaatattctcaacgtcttctttccaaacttctttatcaacactgagcagagcgtcaagttcttcagcagaaatgccgaggcctgttgtgtcgatgtcagaagctgtgggaagcagaccgatagcactgtcatgggcgtcagccttgcctgaaacacggtcgagtatccaaagaagaactctcatgttatcgccgaatccgggccacataaagttgccttcatcgtcttttctaaaccaattaacgtggaatattgcaggagcattgtcaccgagctttttgcccatttcgagccaatgtccaaaataatcagccatgttgtatccaacgaatggtttcatagccatagggtcacgtcttacaacgcctacagcgccggcagcggcagcggtagtttcagaagccatagtagctcctacaaacacaccgtgttcccagtcgcgtgcttgatataccagcggagcagttttagcgcggcgtccgccgaatacaatagcagaaatcggaacgccctgtgggttttcaaactcagaagaaatacatggacagtttatagccggagctgtaaatcttgagttaggatgagcgaggttgccttcgtatgttgttccgtcaaccttttctcccagccagtttgtgcagttctttggaggattcttgtcaagaccttcccaccatactgtcaggtcgtcattgttaagagcaacatttgtgaaaatggtgttcttctttgtagattccaaagcattgaagtttgtcttttcgcttgttcccggagcaactccgaagaaacctgcttcaggattaatagcatagagctttccgtcttcaggattgattctcagccaagcgatatcgtcgccgactgtccaaaccttatatcctttttcctggagatattccggcggaataagcatagcgaggtttgtcttaccgcaagcgcttgggaatgcggcagcaatatacttaacttctccctgaggattttcaagaccaaggataagcatgtgttctgccatccagccttcttgctttccaagatatgaggcaattctcaaagcgaaacacttcttgccgagaagaacgtttccgccgtaagcagagttaactgacataatcgcattgtcctgcgggaagtgaacgatatatctttcttcaggattaacatcctttttagcgtgcagacattttacaaaatctccgtctgttccaagaacgtccataacttcctgaccgattcttgtcatgatattcatgttaagaacaacatagatactgtctgtaagctctataccgatttttgagaaaggtgagccgacaggtcccattgaataagggataatgtacattgttctgcccttcattgcgcctgtataaagagccttgagcttatcatacatctgacttggctccatccagttgttgattgggccggcttcttcttctgtcggagtacagataaatgttctgtcctcaacacgggcaacgtcgttttcagctgttctgtggtagtaacagcccggaagtttttcctcgttaagcttaataagctcgcctgttgatactgcctcagcgcggagagcctcaagctggctttcgcttccgtcaatccatacaacactttcaggctggcacatagcaatttgctcttccagccacttgtttactttttcattactgcactttgtaaattcagccatattcatcctcctaaaattcatactagtaatttaaaaatttaaacaaatttctagttagtttattttatcacaattctacctcaaatatttggctctgtcaaatagatttttacaaccattgatacatctttcacaatatctacagtcgtgatagttcttgaaaaaaatagctgaaaattttgtgaactttgcttaaaagaaaatgctacaaatttagtaggaaatcatttgatataaaatttatcttcataaacactttgtttaaatatttttttgtgaaataacaattttgataaattcaacttacatataaattgaaaaaataaatagagctgtatataacaaacatcggcagggtgaccgaaggtcagcgcgttaggtgcgtagtcgcggaatagcagctaacaaattaaaatcaccgttaacctatgtccgtatagtttgccttataaactgaaaaatacggaccgacggaatttgccaagagcagtttcgcgaaagtggtatgaataatattttaaataataaaagaaagataaatataaaatacatataaattaaaaagtaaatagagctgtatttaacaaacatcggcagggcgaccgaaggtcagcgcgttaggtgcgtagccgcggaatagcagctaacaaattaaaatcaccggtaacctatgtccgtatagtttgccttataaactaaaaaatacggaccgacggaatttgtcaagagtggtttcgcgagaatggtatgaataatattttaaataataaaagaaagataaatataaaatacatataaattaaaaagtaaatagagctgtatttaacaaacatcggcagggcgaccgaaggttaccgcgttaggtgcgtagccgcggagatgcaaaaaataaataaacataactctaaattaacacaaatcaattgaattcattaaccaaatagatgtgtgctgctgtaaaacacaaaatttgatttataaatttatagttattcttttatttaagagattttatgaacttataagttatttaaactaaatgtataacagataaacatgacatttatggatatataaattattgtttaagtaaaaaacagaccgaaacgatttcggtctgtatctaattaatctttatctattaaagcaaaggaaatttcaccttttgccgctacttcatcgccgacataagcgcaaacgtcagctttgcccattactgaacggaactttgtgagttctacctcaagtcttaacgtctcgcctggcaccacttgatgtttaaatttaaaattatttattccggtaaacacagccagcttgtttttaaattccggtttgctcagtataacaacagcgccaacctgggcgagagcctcacaaatcaaaactccgggcataattggattccctggaaaatgtccctgaaagaacggctcgttcatagtaacatttttaagtccaacagctcgggaaccttcctcaaactctactattttgtcaataagcaaaaatggatatctatgtgggattatatccattatttctttaatattaagttccatataataatacctccagaaatttttatgctaatattataactcaacaaaaaatattttacaataagtattttggtatagaaatataaaaataaaataacattttaatataccgaccgcgcagcttgccttacgagccgcaaagcggactgctgcagcccgcctttgtgttaggataagaaaatactattaaatcaccttataaaatttaatataaatagtgacttaaattatatgtagataaattaaataccttggaaaatattttttatatttaatatgatgtagagttttatgcacagttgatagttgcagaaaaaaatctgtcaaatgttataagatatgtaaattttttaatttttaaaaaaattttttcaaaaaagtattgacaagctattctaaatatgttatcatagtcaggtcgttaacgcgagacagcataaacggcgctaattaaacatggaggggttcccgagtggccaaagggggcagactgtaaatctgttgcatcttgcttcgatggttcgaatccatctccctccaccacaacggagcaaagttcgctttgctccgtttttgtatagaaaaaataagaaatgtcttatatatttttaagtgaaactgtctctgtcaccgttatttttctcagttgtggctattgccgcgcaatacacagctttggcgccggaaagttttaacactcttgcacattcattgaatgttgcgcctgtggtcgtaacatcatcaataaccaggatggttttgcctttaatattatcgctgtttcctttgagaccgaaagctccgttcagattttgctgtctttcaaagctagaaagctctgtttgtttactggtttgtctgattcgtttaaaaaggtttggataatattttacactgagcagtttggcagtcttttttgccagcgcaccgctttggtcaaaccctatttctttcatacgctggcgccgcggcggtatagctgtgatatagtcaaagttgacgccgccaaaatcatttttaaccattgctgttattaaatttgaaaatgtgttcactgaacttaggcttcgggcgtgtttgagattaattattcctcttttggaatttcggtcatattccacagcagcagtaataccattataataggtgcatatatctgacttagcttttctaaaacaactttggcagaggcggtaacgagggtttccaagcggcgtgccgcagactttgcagcgcttgcggctggcacagaattttatcttatccatacattcactgcatatattaatgctggatttttgaaaacttattaattttccgcagaagctgcatttagatggataaacaagatttacaaggcgtctcaaaatattcatagactatgatacctttcgcatataataattaattttacattatatgacataattttgcaagatatatcaaaaatttggcgttaaactaatctaggcgtgatttatttatgacaggaggacaggatttgatagaatttattacaaaaatagattttgcggttttggaatttattcgaaacacattaaacagttcttttatggattacatcatgcctattataaccgattttggttccggaggactgctttggattgcggtgggagtcataatgttatgcactgaaaaatatcgaagatgcggggcttcggttttgattggactgctgctgtgcttggttttgggaaacatcattttaaaaccgcttatcggcagaatgagaccctgctggataaatgacagtatagatatgcttgttaggattcccagggactactccttcccgtcaggacataccctggctgtttttacaacggcgtttataatttttggatattcaaaaaagataggaataccgcttgtagttttagcgtgcttaattggattttcaagaatgtatttatatgtccattaccctactgatgtattgggcggcatagcattagccgctctcattgcgtgggcagttagaaaatttgttaacgggacagtattcagccggatgtttcggaggtttgaagactagaagtttcggttataaaaacttaataattttttatataatatttataaaatcatgacagaacagagttgttttttaaaatcttatataatataataaaaagagtgactttttgaagtttataatttacagataaagcggtttaacttacgattgaggagaggattttttggaaaaaacagaagcaactaaagttgaaacaaaaggcggttcaaaaggaagccattttatgcagggggctttagttttgggtatagccagcctgattgtaaaaataataggcgcagtattcaaaatacctcttattaatttgattggcgatgacggaagcggttattttaatgtggcgtatcaaatatacacgtttatgtttatagtcgctacggccggatttccgatagctatatcaaaaatggttgcagagagtatggctagaaatgatgaaactgatgccaaaagagtatttcagacggcgatttcatttttggctgttataggattggccggcagtataattctatttgtttttgcaaaacagctggcaggtttggttggaattccggatgcagagcttggtataaaagctatttcgccggcagttttctttgtatctttggcgtcgtcaatgagaggctattttcaaggcagacaaaatatgttcccaaccgcaggttctgaagtaatagagtccagcggtaagatggttataggcttgctcatggcgtcgttctttatggggatgactattgttccgaatttggacaaggtgatagattttgtaacacgccaggtagacaccgcccatatgcgtacagtttatgcgtctgccggagccatttttggtgtgactgccggaactcttttgtcgttcctgttactgtcagtaatatacatatgcttggctataggtgcaaagcggcatgctaaaaatattgcgccgatgacagcggcccaggaaaagctgagaccgaaaagaaccattttaaaagaactgataatgatagcaataccaataactataggggcgtctgtttcaagtcttacaactcttatagatatgacaacaataagccgtaggctggttactaatccgaacgtgtttaacgagtacgcatttatgtttgaacaagggacgtcattctatgataaggccgttggagcaggatggaccggtgcggtgctcgattcacagaaagcctcaactctttatggaatgtacacgggaaaagctctgactatgtttaacctgccgttaaccttggttgtggctctgggaatgagtatagttcctgcaatttcatcagctttggctagagccagaaaaggcgaggcaggaagcatcactgagagcgctataagaattgccatgttgttcggtgcgccgtgcgctataggaatgtcggtgctgtccagcggtgttttaggtctgttgtttagtgacgacaatgcgcatgtggttttaagcattttgtcaatagcaataataccggttgccgtagtacaagtcacaaatgcaatactgcagtcatacggaaaagtctattatccggttgtaaatatgttgataggcggagccgccaaggtaattttcaactatatagcaatcccgtacttaggtattgacggagcgcctataggaacttttatctgttatttaatcatagcggtgcttaataccgttcagatagtacgtattgcagacataagatttaaacctattgatatacttataaaaccattgattgcggccggcgttatgggtgtatgcggatactttttatccggtattctgccaacttcaagagttctcactgttttagaaattcttatttgcggaataatatatgtaataatgattttcgctgttcgggctataaaacgtgaggatattatgaatatgcctaagggcgaaaaaatagccggtatactagaaaagtttaaactgataaaataattggagctgaagaggatgaattttaaagatacgaaagataaatatacgtttgatgacctggttgaaattgtttcacttttgcgtgcaccgggcggctgtccctgggatagggagcagactcatcagagtataaagaaaaatcttattgaagaagggtatgaactgattgaggcaattgacggcgggaatcctgaaaaaatagccgacgagagcggggatttactgctgcaggtagtgtttcatgcaataatcgggaaagacagcggagaatatgaaataaatgacgttaccgacgctatctgccgaaaacttattcacagacatccgcatgtgtttggtgaagtcgaagtagcggacagcggagaggttcttaaaaactgggacgctataaaacgtgctgacagggagcagagcagcattgctgaggaactgcgcggagtatcaaaatatctgccggcgcttatgcgagctgagaaaattcagaaaaaggccgaaaaggccggttataagtttgaaaatgagataaatttgtctgtaatttcggatgatgtagccgaagcagaaagtgcaccggagagggactgcggtcagctcctgtttgcggcggtaaacttttgccgcagagccggtgtggatccggaattggctctcgcttcttatactgagagtttcacagatgaatttgagaagtttgagaatagagaaaattaaatctatttgaaaaaacactaaggagaaaattgtaatgcgtttggataaatttttaaaggtgtccaggataatcaagcgccggacggtggctaatgacgcctgcgacgggggccgcgtttccgtaaacggacgcactgtcaaagcgtcatatgacgtgaagcccggagatgaaataaaaatattatttggtgaaaaacctttgaatataagggtcttaaatgtaaaagagaatgtaaaaaaggatgaagccagagagctgtatgaaatagtttaaattttacagataataaatatattgcgaaaaataattctgtctgtgtctgtcgggcagtattgggtttgacgaattaaaacaacttgtcgagtaaatacatgctgtttatatacctaagcggccgccgttaaagaccaaaaattattagttaaaacagctcattataggattaagctgtatctagcaaaaacctaatgggtttagttgatacatctgtttataaaactaagtagcagttggcagaaatataaatggacgtttttatgagttttttccgttcttatacaagttgggtgcaccttccgcagtatgatgaatacctacaattttatgttttttatttatttaaaaactataggacaggaatatagcgagcatcggcaggccgcttttgcggcacgtaaggcgagctgagcggacagtatataaaggtacaattttatataggatgctatcccacgcctacgcacctcatatagtggtatgcgaccaatttgagtattcatattattgacactgcagttacaataaaacaggttaatatggtttatctccactttctaaaaaaagtgggggtcacatctaccgaagtttaataatacattaattttatatttttaatattcaaagctatttataattagtattgaactaaagacaggaatatagcgagcatcgacaggccgcttttgcggcacgtaagtcgagctgagcggatagtatataaagatacaattttaaaaagatacttaaggcggaaatttatatatcgttttaaataatatgtccatactacggtatgatgtttctacttatatacagcaaatgcgctgtaatattttgctcgaagcagaagacatatatattgataattaaaacgttattattgctaaaatctgataaactttgcaatgtgcatttcgtttagtgtgctgaaaaaattgtcgtcaggcaaaaaattacttgacaaaggtctcacagcgtagtataatctatcccgtagacagcaaaggcgctgtgagtattttgctcgcagcgccttattttttatttagtcatttctatttacttttaaaaagaaaggaatgttttgttatggatcaaatgaacgagttattcggcagtgccgtatttgaagactcggtgcaaaaggtcagacttcctgatggaatttacaaacagcttaggaagaccaaagaggagggcacgcctcttacgcgtgaggttgctgatgttgttgccaatgcaatgaaggactgggcggtagaaaatggtgtaacccattttactcactggttccagcctatgactggcgttacagctgagaagcacgacagctttatacagcctgacggtatcgacagcgtgattatggagttcagcggaaaagaattgattaaaggcgagccggacgcttccagttttccatcgggaggtctgcgttcaacttttgaggcaagaggatataccgcgtgggatccaacatcaaacgcctttattaaagacggtatactgtgtattccaactgtattctgttcttatacaggcgaagcgcttgataaaaagacgccgcttatgcgttcaatggaagctctcagtaactcggctgtcagggttcttcacctgataggggaaactgacgtaaacagagttataacgacagtcggtcctgaacaggagtattttttaatagaccgaaaggtagctttaaagagaaaagatattacatatacgggcagaactttgttcggaactccggctccaaaaggacaggagcttgacgaccattattttggagtggttaagagaagagtttcagagtatatgaaggatttggacgaggaactctggaagctgggtatacttgcaaagacaaaacataatgaagtggcaccggcacagcatgaactcgctcctatttttacacaagctaatatagccactgaccataatcagcttactatggagataatgaaaaaggttgctgaaagacatggtatgaaatgcctgctctacgaaaagccttttgaaggaataaacggaagcggcaagcataacaactggtcgatttcgacagacaagggcgaaaacttgctgaaacccggcaagacccctcatgacaatcctagatttttattgttcctgtccgctgtgatagcggctgtggacgaatatcaggatcttttaagatcgtctgtggcaacggcaggaaatgaccacagacttggcgcaaatgaggctccgcctgctattatctctgtatttattggagatgatctcaaagaagtgctggattctattgaagaggacagtgattttgagaacagatgtaatgaggtgatgaactccggtatcgacgctgtgcctgattttgcgaaggatacaaccgacagaaacagaacgtcgccgtttgcattcacagggaataagtttgagtttagaatgcccggctcggctctttcaatttcaggaccgaactttattataaacacagctgttgccgagatacttgaccagtttgctgtcagacttgagaaatcgtcaaaccctaaatgcgagatttataacatagtaagagatactatgaaagaacataaaaggattatttttaacggtaataactattcagacgaatgggttgccgaagctgaacgcaggggtctttgcaatttaaagagcacgcctgaagcattgccggcttttgttactgaaaagagtatagacttatttgttaagcacggtatactcacccgtgatgaaatgctgtcaagatacgagataaatcttgagaattacagcaaggctatcaatattgaggcaaagacgatgcttgaaatggcaagacgcgatatttcgcctgctgtcgcgaaatatgttaaagaactcagcgatactgttgtttctaagagacaaatgggcggttcggtttcttgcgtgtttgaagaaaagatgattagattgctttctgagttagaacttagactgtttgaaacggttgaagctcttgattcaagcgttcaggaagcccttgctatggaagaaggtttggagcaggctgtattttataatgaaaaagtgttgaaagatatggctgaggttcgggaagtagcagaccaaatggagatttatactcctgaagaatactggccgttcccaacctatggagatttgctgttctctatccaggagtaatatagcattccggcaaaatatttctaagttataggttttaaaaagtaaataataagataatagacaatggggtctgagagtaattttctcaggccccattttcttttatatatatacggcgaaacagccggaattaaaaataaggaggaaaaagttatgaacattatggatttggcaacgggtttagatactgcgtgggtgctgctgggagcagctttggtattctttatgcaggcagggttcgctatggtcgaaaccggtttcacaagagcaaaaaacgcgggtaatataattatgaaaaatctgatggattttagtttaggaaccccaattttttggattttaggttttggaattatgtttggcgcaaatgtctttggcggctggctgtcggttccgtcatttttccagggagcaaacgctttgcccggtgattataattttgcaactttaatatttcaaacagtattttgcgccaccgcggcgaccattgtttcgggagcaatggcagagagaaccaaattttccgcatatattgtttacagtatggttataagcgcagtgatttatcctgtttcaggacattgggtttggggcggcggatggctcagtgaattaggttttcatgactttgcgggttccacagcagtacatatggttggcggagtggccgctctggtaggcgcaaaaattcttggtccacgtataggaaaatataaaaaggacgggacatccgtcgcaatacccgggcattcgttaactttgggggctctcggagtatttatactttggttctgctggtttggatttaacggatgttcaacagtagctatgtcagatacagagagttcgtcgttggcggcttcggtttttgtaacgactaatcttgccgctgcctgtgctacagttgctactatggttgttacatgggttagatataaaaagcctgatgtttctatgactctaaacggcgctttagccggtcttgttgcgattacggctggctgtgacagtgttacgccgctcggagcggccgtaattggtactgtggcaggtattttggttgtgtttgctgtggagtttattgacaagaaacttaagatagacgatccggttggagctgtggccgttcatgggtgctgcggagctgccgggacaataatgacgggtttgtttgcagcaaaaggcggtttattttacgggggcggtttcagctttttaggtattcagacattaggagttataacagtaatagcgtgggtcgctgtaacgatgaccattgtatttctaattattaagcatactatggggcttagagcgagtgctgaagaagaaatagaagggcttgatatacatgaacatggcctagcctcttcttatgcggactttatgccaaatgtgccgactattttgacaggaagatcagagacagtgggacaggaaactcccgaatctgctgtgccgataattagagtgccggataatacggaaaagaaagttgataaggacggtcatactattacaaaaataacggtggtgtgtaaagaatctaagtttgaagctctaaagcacgctttaaatgaaatcggagtaacaggaatgactctcacgcatgtgctcggctgcggaatgcagaaaggcagcagtgagtattaccgcggcgtacctgttgaggctaatcttctgcctaaaataaaagtggatatagttgtgtgcagagtacctgtatcagatgttattaaagccgctgttaaaatactttatactggacatatcggagatggaaaaatttttgtttatgacgtacgggatgtggtcaaagtcagaactggagaatcaggatatgacgcaatgacggatgatggagaaaattgttgagtttagaatgggtttaaggttaggtgaaataaggagcgggcgtaatgcccgcccctctttttattcatcagacagcatcttttttctattcattccgtctataactccctgacggtaagacgctttgcattcttcaatcatcataaggttattattttctataaatttaatgacgtttttacattcttcttcgctaagtttttgaggaataaagcgttctaatacctgtctaacagcttcggaggagcttttgtaaatctcctgctcgtggattaagtcattatatttttgactgtttttttgatgatagtacagaatgtcatagatgtactcctgaaggtcactatcaaagtaattctcaaaaaatttagatgcgttttcttccgacacaaaaatctcccttttcaattaaaattctttttatattatatacaaagtttgtcaggtatatacatcacccccaaaaaggaaacacttgagtgtttcttttaaatttattccttgacacatgtatatttttttcacacaatactttattatataataaaataaataaacattacagtaaaatttagatatttaaataaaatgtaaataatcacctatgaatattattttattataaaagcttactttattaagacgatttttatttaaaaaagttttacattaaaaaaataataagaaataaattaaacaaaaaaattgcaattaaaaacctgccggaaactccggcaggtaataaagatcccctattttttttgcgtaagtgcgaaaacatccttagatttgcctattacaacaagatggtcgcttggctggaatatatattcaggggtaggcaatggctttagaatgttttcctgttttattcctattacatttacttcatacttttgtcttatattaagcgaatttatgcttctgccgatccatgaagggacaacaggtatttcgtatattgagtattcgcttgtcagtttaatatagtcaaaaatattgtttgcgttatagcgcatagccagtttttctgcaatctccttctcagggtacactacctcattcgcgcctaccaattttaagaacttagcctgtctgtcctcgcgtgcctttgaaactatatagtttgcccccaggtctttgagcatagatgttatttccagtgaagcctgaaaatcttctccgatagccacaaaacacaggtcaaaattgtttattcccaaagcccgaagaacgccttcctgccggcagtcgccgatttgtgaatcagtgaatattgaagaaaactgctcgatagtcgaatcatctttatcaactatcataacatcattaccaagcgccagcattttggttgcaaaatgcctgcctaaacgtcccattccaattaccaatatagatttcataatcagacctccaaaacttatataaaaacttattatcctattaatatatcttcaacaggccgcataagagccacaggctctctgttttcggcaagcaccagcatgagagacagtccgcctaccctgccggcaaacatcagcactatcagtattgactgggacacaacagacagcgacggggtgagtcccattgaaagcccgactgttccgattgcggaactgacttcgaacagtatttgtcttattgtatatggctctattgagcaaataataaaagttgataccaaaacagccgttaaatagattgatgatatagcgctggctcttttcagtgtgtcgtcgctgagacggcgtttaaagattacaacgttattgtttttccttgatgatgcaaacgccataagaaataaaacaacaaaagttgtagtcttgatacctccggctgttgaaccggggcttcctcctatcagcataagcacggttgtaagcagagaactgctctctgagagcgaggataagtcagtagtgttaaatccggcagttctgggtgtaaccgcttgaaaaaatgagtgcagccatttatcagcagtggataatcctgcaaaatttttattcttttccaaaataaagaacagcaccgtagaactgattaacaaaaccgcagttattgagagcacaatttttgtgtgcagcgaatagtgtttaaagtcgagcttagcctttattatattattccaaaccataaatcccaggccgccgataacaataagaccgcagattgtcagattaacaaccggatcgctttgataatgtatgagggaagagttaggttcaaattttcccataaggtcaaaaccggcgttgcaaaatgccgagattgagtggaagatagcgttgtatataccttctaaaaaccccatctcaggacaaaatcttgttgccagcaaaatcgctcctgcgctctcaaatattaatgttccgaaaaaaatacgtctgacaagctgtatcattccgctgagtttagtatttccggcggactgcatcaataattttctctcgtgaagagaaattctccggcccataaatatagaaaccgttgtaataacggacataaatcccaaaccgccgatttgtatcattaaaagaataaccagctgaccgaaaacagaccagtgcgtatatgtgtcaaatagaactaagccggtgacgcatgtggcgctggtagccgtaaacagcgagtcaaaataagacgtccaggtgttatcttttgaggaaataggcagtgaaagtaatcctgccccgactactatgataaccaaaaaaccaaaagcaattatttgggtataggttgccttatgtttttgtaatgtcctattgttagatgacagctcaaaatcaggagcttccataatattttcctcctatattaccaatgcagcataaaaatgctgttaaaatttgtcggcgcttataaaaaattcacagccgacgggagcaacgtcgatttctattatactatctctgacaggcactatttcaggatttgatatgccgtgagagaaaaatgaaaaatcaccaaactctgaaatgtcaatatcaatatgtttggattcaaagctccggtttacagcgcaaattgccaaactgtttttacagcagtttccaaatgcgttctttccattttttgtgaaacgggcgtatatatataggtcgccgcttgcataaactgttttataatatccaagcgtcaaacagtcggaattgtttcgcagtgcgccaaggtcagtataccactgtctgaggtcagggtcaatagcccgccacggataagttcctctgttaaacgggtcgctgccgccctgcattcctacttcgtcaccataatatatacatggaacgcccacaaatgtcatctgtacaaaagacagcatttttagccgataggttgcgagttcttcgtttcctgaggacaatttctgtgttccgcagtcctgcgaaagaccgccgagcagagtttttatacgcattgtgtcgtgagttccgattatattcatcagggagtacagcgtctcttttggataattctcaaaaatagacataaaatgcgcgttcaggcattcagcgtctatgtttcctaagagaaatgcaatcatattatccttaaacggatagttcattacactgtcgagctcttttcctaaaagatactcgcggcgaatactgtaggagactttattagacgcgtcttcccaaacctcgcctattataaccgcgtcagggtcttgtttttttacttcccggcgcagaattttaataaattcatccggcagttcatcggctacgtcaagtctccagccgctggcgccgcgtttaagccaggtctttataacagaatcctcatctcttaatatataatcaaggtatgaaggagtcatttcgtttacgttgggcaggttactgcagccccaccagctttcgtaattgggatagttagtaaattggtaccattctttatattgactttgtggatttttgtatgctccggtattattaccataattgccatacttgttaaaatatatgctgtcagcgcctgtatggctgaatacgccgtcgagaataactctgattccaagtttttccgcctcatcgcacagagctgtaaatttttcgtttgttccgaacatcgggtctatattcatataatctgcagtatcatacttgtggttggaatacgcgtcaaatattgggtttagatatataacgccaacacccaaactttttaagtattttagtttgtctattataccgcttaaattcccgccgtaaaaatcgttgcaggcaggccccatttcgaaaggatgggcgttaaatgagattggctcataccagtcgctgtgtattatatactcgtttcgctttttgggtataactccatttgtgtcactgtggtctccgaaaaacctgtcagtgaaaatctgatacattatttgacctttaaaccagtcaggtgttttgtagtccttatcgtaaacagttatctgatagctgttatttgccggctcggtctgcgtctgtccgactcctcccaaagaatcattattatttatatagtaaacggcttttcctcctgtctcaactataaaataataccataccaaaccttctttttcaggcataggaactgttgcggtataatagaactcgttttctgcagtattttcactgcctgatgacgaaagggactgtttttggttttccctgctgttcttaggcgccatatcataaaatatttcttcctcgttttcccaaaaccgaattttaactgcgtcaggctgagtatcagaaattatctttaaagcaagtttaactttactgccggtagctgcggcgccaaatggcattctataagctgtatcatgtgagttgtgaaaaagctgcatactatattcctccaaatttctacaatgctgtttccttaatatattatatatattataggttactacacaaacaggtattatacaacagattcttttaaaattcaaatacaaaaatataacaattgaaactattgtcactatgtgctataattaaggaaaaaatttggaggttttaatgaaatatattatatttgatatggacggggttatagtgaattccgaacctgtcattatgaaagcggcgcttgacgctcttaagaacggtggaatagaagcatctgaagaagattttataccctatatcggagccggcgaagagcattttataattgagccgtgcaaaagggcaaataaagcggaactgacagaaaaaataatggatgatatgtttagaaattttgaacaaaacatcaaagaaatgaaggttttcccatcagcaaagccgcttatcgaaaaactgaaaaatttgggatacacgctggcgcttgtgagcagcgccgcagaaagaaagcttgtggcctcgctaaaagccgccgaaattgacccgtcggtttttacggttatactttcaggaaatgatgtgacggagaagaaaccgtctcctgcaccttatttgcttgcggccgataagctgggcgctgacccagctgagtgcttggttatcgaggacgctttaagcggagtaaaatcggcaaaggctgcaggaatgcagtgcgccgcggtcacaacctcatttagtgaagagaagttaaaatcggccggagcggattatgtgactagagatataatagatatattaagtttactgaacggataaaagggtgattttgtgtttaaaacagtgtatggaacggctcgtgcggacagcggcggttatttgtttgaaagcgtcagggcgaatataaaaaatggaataaagtcatatctgctcgttccggagcagttttctgtttttaccgaacgcaaagttatagaaactttgggcgttaaggctcagactttggcggaagtgttgaccttttcaaggctttcgaatcttgtgctcagcagcctggggcctctcagactgagatacatagacggagcaggcagagaaattcttgctggcagagctttgcagcttatagaaaataaactgcagtattttaaatcaaatgttcatcagagaggattttcaagtctgatggcggggcttgtgtcggagtttaaacggtatggtctgagttttgaaagtctgcagactgtttccgaaaaggtagagaaagatgagtttaaacgaaagctggaagacttggctttgttttatgatacatacagcagattaatcaacgaaaataattctgacgcggaggataatctgtcaataatactccctaaaataaaagactttgaaattgaaacggactcgtgtctgtttataaccgaatttaagagttttacgcctctggagtgtcaagtgctgcaggaactgatgaagaagatgagtaacacagttctgtttttaagatgcgatgaccttgttcatccggacggtattttcagttcggcgtctttgacatacaaacagcttgcggaagccgctgaagcgtgcgggattgaggtcagcaagcctgagattttgccggtcaaagacggcggaaaatctgaccttatatttttgcaggacaactattttaatataaaccctgaaaaatatgacggaagcccggaaaatatctttatatattctccggaaaatcattttgacgaggtggaacagaccgcgtcaattatacatagactgtgcaggattaaaggctataagcaaagcgactttttgatattggcaagggatacagatgtgtattcaagaatcatgcctctcgtatttgataaactcggtataaatgtgtttttagacaagcggcgcagcattcttgaaaatccatatttaagatgtatttcaagcatgcttgaaatacttgcctatgggttttcttatgacagggttatggaaatagggcggagcggattcgccggagtcagcaatgaagaagagctggatgtctttgaaaattatctgctttctgtcaaccccagccacgcgatgtggaatgatgaaaatgagtggacgtataatccagataagcgcgcttatgatattgatagtataaaccgaataaaaagcgtgattttagctccgatttttgagttgaaacattcaataaggggacgtaaaaaggccagtgaaattaccgaagcggtttttaagtatatggaaagatgccgtcatcaagagataatgcgtgatatatgcaaagactattcggacaagggcatgatatatcttgccgaagaatataggcgcacatggaacagcgtggtgtcggtgcttgacagaatctctgaaattatgggcggtgagcttataacgtatgagaagttttatgatttgtttatatcggcctgcggcggaataaaaataggaatatctcctcagacgattgacggcgcagtgttcagcaaaatagatatgttcagaaacactgatgcgaaggtggttatagtccttggggtaacagacggtgttttccctagaggttatggaaacgagggtatactgacggatgcggagagagaagcgctgagggaatacggcattgatttggcaatgacagcgtcagaaaagtcgcatgacgagcagcttttggtatataatgttttatcatccccatctgacgaattatatttgcttgctccaaagtcctctgacgatggagaaagtcttttcccgtctaaaattataaccaaaattgagaatgagctttttgatatggaaagagaaaatgtgaatgacgatagcggtgagctgccggagggtaaagaaccggtatttttggcgcttgaatccgaatttatcagatgctgcggagatgtaggcaaatttgcaccaaagtggcgtgcagtctatgatttttatgctgaggatgaaaagtacggcgcacggctcgctgactttgcagagaggttgaaagccgccgaaagcggttatgaaatactgtccaaaaattcggtcgcaaaactgtacggcagagaaataatgctgagcgcttccaaaatggaaaagtataacagctgtgctttctcttattttatgagatatggtctgctggctaaaccaagagatattgcggtttttgatccgctgagtatgggtgatatactccataaatctttggaacgctttttctcctcaaaaaatgacgttgactatgagtcaataacacgggaacagtgcgagaccgaaatgcggaatatagtgagcgaaatagccacgggaaacgaagaggttatgtataaaaattcagcttactataagtatttggttatgcgtatgaccggtatcgcctcaacaaccgcgtgggaaacggtgaaatttttcagggaatccgaattccgtccatatggctttgaaataagaattggtgaaaacggcgatattccgccgcttaaagtcgaaacaaaaaacggaacagcctatgtggaaggttttattgacagggcggacagcgcagtaatcggtggaaaacgatatatcagcgtggtggattataagtcgtcggctaagaaactggacaaagaactggctgacgccggagtgagatttcagcctcttgtgtatacaaacgctgtctgtgagcagagtgaaaccgagcctgcggctatgctttatctgcagatgaacgatcctataatagacgaatctaaagcagcgacggacgaagcttttgaaaccgaggttcacagaaacgtcagcgcaaacggttgggttgtggacgatggagaggtaaataaagcgtttgataagaactatggcagcaagaaatgttatatgtcaccgaaatgcggaataccgccggatgaaatgcaaaaacggctcaaaagagccgaagaaaaaattgtagagtcagccgaaggtatactggccggagagatttcggtcagtccgtacaaaaaaagagggtttgacccatgtgcttattgcgattacagcggaatatgcggaaaaaataatagttaaaatatgcgggcggtttggcatatctttatgagccgaatctgctcgctttttgctgaataatatttgcaaactttatttcgctcaagtataccctgcggaaacaattgagtaatttcagtgtaatatacctgtaataaatttagggatgtttcacaaattttcagtagcggcatacgtttttactgaagcttaatgtaaacattacaaaaatattgctaaaattattttttgtggacaaatgattattggctagaattaggattgactttttaatcaaaaggttgtttaatagagatacaaaaaataaaatcatcaagtttgaaagacaggtaaacctgtcaggatagtacaggagggaagacagttatgaaagaattttcgtacactatcacaaacgagtatgatttagctgctaagccggcgtttgacttgataaagcttgccggagagcatgattgccgcacgtatgtcgtaaagaacgaccatgcgaccgatattaaaaagctatttattctgctcagtatcggaacaaaatgcggagatactataaagtttgtgacagacggcgttgacgagaagtccgctattgataaaatcggaaaatatgtttcctgcaatatgtaggtcaatcttttagataataaaatcagcttaaatcatacaaacttgccggttccgtgtttcggaaccggctaattttttataaaaaaagaccgccgcttaaagcggcagtctggcaatattttatttaattatgcctgaggagcgtcaaccggacatacgtttgcgcagttaccgcagtcaatacattcgtcagcattgatttcatattttgcatcgccttcagagatacatgaaaccggacattcgctagcacatacaccgcattttatgcagtcatcattgatttgataagccattatagtcacctctctatgtaaaattcaaatttattcttactcttgcattatatatcatcaaaggttttttgtcaagatttaattaagatttaagacattattttacaggttttttatagcgtctgtaatgctcttttccattgctaactttccatatttgtcaacttctgttttattcttaggtccgtgggtcagacagccagctccgccgatacagccccccacgcaggccataccctcaataaagttgatgtttcctattccctttgacgctttaagcagcgctgtacggcattcgtcaataccgtcgcatgaaacggcgtggagttcaaagtctccgttgccctgctccttgagtgcttcttgaacggcctcggcaagaccgccgcagcgggcaaatatcctgccgtaatatgatgcgttgttgagctctgattcctcaagttcagtcaggtctatctcacgcgcgtcaaataacgcctgcagttcttcgaatgtcagagcgctgtcaacatactcttttataccgtcttttctgatttccgctttctttgcagtgcatgggccaataaatacaaccttgcagtcagggtcgttctttttgatatacttggctatagccgccataggtgacggattgtgtgaaatgttctctttaagcatcgggaagtttttctccacaaattctacaaaggccggacagcaggaacttgttaaaaatcccttctccgctaattctttagcttcatcataagctaccatatcagcgcccaaagccgcttctacaacattatggaagcccagcctcttgattccggtaaccacttgaccaagcttaatattagcatatgagaactgacccgaaatagaaggagccacaaccgcataaagctttaccttgtcgtcgttggcgtattttttcagcatctccacaacttcaactatgtaggatttgtcagttatcgcgccccatgggcattgatatacgcaggctccgcagttgatacatttgctgtcgtcaataacagccgaatgctcctcgttcatgcttatcgccttgaccttgcaggctttaacgcatggtctttcggtgtgtataatagcgctgtacgggcaaactttagcgcacattccgcactgcacacatttgtctttgtcgatatgcgctttctgattttcgtcaaaggtgatagctccgcgtttgcacacgtcctcgcacctatgagccaaacagccgcggcacatgtgtgtaacttcgtagccggcaacaggacactcgtcgcaggcaatgtccagaacctcaattatgttgtcaacatttttatgtccgcctccggccataccgattctctcgcccactatagctctttccttgtaaatacagcagcgcattgtggctttgtcctttacaatagttttggctatgtcgttaaagctggtgactaggttgtcgtcgtcatatgtatgtcttgccacctcacgaagaaccttatattttaagtattgaaccttagtatcaaattttttgagtataggtttgttttggttgttcatatataatcctcccgtttttactcggctgatactgattttagccggataataaatctatatatctaaaaataattaacagtcacggtttttcccatgtcttctaaacattgtctcagttcgtcgactattttaagttttatgctgaaagaaatatttaaatttgcgtcctgatgggcgtcgttctgagccttgccgacaaacaggtttatgtcggttgcttctttaaacaggagccgggctatttcgctcgctccgtccttttgttttccccatttttcaaatagggaattgtcttcaagataattttttgcgtaatccaaaaccctggctatcgttataactccttcagtcactaagtccacaccctcgattgaggctgtcggtggaatagaagggtcgctgtagtcaggagcggccactatttctttgcccaaataccgggccgtaattttagaggtcgtgccgccgcataccacatgccgcccctgttttgaaaagaacagtgccatcaccttattgtcgtcttccgggtgctccggcggtccgaacaaaaggttgcaggtcttgcgtttccgaatctgaactgcggcaacagttgtgtcgtctcctggctctgaagcgtaaagacggttgcattcgtccgctatttcggaagctataatctttgcggtctgcttgtagttgtagttcgcctcaacataggctatgatgttttctctctgccagccatagtttaagacgcgctcaaccccggcgtatattgcaccgtcgctcatcattataaaaacatcgtcaagctcaacgggtattttagtctcataaatctttttcccctcgataatcctttcagtcatgggatattcgtaattcttcccttttctgagcagtataacaagcggattgtcaaattggattatctcggcttcagtgttcccggtgaacctcataatagtaaaggttgaataggccacgccgcgttttttgcagaccggcagtgtagccgcaacggtcgaaacgcattcatcgatactcatattctccgccatcatggtggagattattttagaggtaagcgttgagagaatattggcttttactccgctgcccaaaccgtccgcgaacaccacaatcaactcatcctcacggcgcacaatttcaaccatatcgccgcaaagttcctctccaacatggttaaggctgacatagccgacatcggcaaataaatcattcatctttattcaaagtctccttaagcttggttaaagcgattttggtttcggcggtagtctcgccgaggagagaggctatttcctgagcgacacgcatctgtttttcaacaaccttatcagtaatttcaatggcgctcatgctttgctcggcctttttctccctcataatctcctcttctgtaacatccttcattatgctcattataatgttatattcagggtcatatattatagtctcgtcaacgtattttttgtactcgctcagatatttccgtttgggttcagaatcctttttgttttcagtcattgctatcatataatctgtcggattcagtatccttacaacaggctcgcccataatatcatttgcgtttttgatattcattatctctaaggcagatttgtttatctgctgtatctctaaactgtcatttaaaacaacaatgccgttcggcgtattgttgattatggtgtctgagaaagactcggccttttccttcaaaaacggcagacacatattcatgtcagccttgccgttcagcacggcgacggccttttcacggcaggttgggtaaccgcagctgccgcagttaagttcctgctcttttgttttctttcccatttggtgcagaatttcctcaatagcagaacttcccggcattactttttttatgtattccgcgtcaaacactttcctgattccgttctcgggctgcttaacatcaaaatctgtcctgccggcagtctttccgatagtgagacaactgctgacatggaaaatgttgtcgtgtttcataaccggtccgcctatacagctgctgtcacaggcgctcatttcaacaaagcagttctcaatatttccgtcgcgtatatcctcaagggcgttcatgcagtcctctattccgtcaacgctgaaatatgaaaaatcatcgtctatatccatgctttcaataattccgcccctggtggggaaccagcgcgcgcgtccgcccccggtcaagtcttcttgtgaaaagtcgaactcaactccgctttcagccatccagtcgttaagctcgtcaaaagtcagggcgcagtccacatagtcagggtatttatcaacctcatcctttttagaaatacaagggccgataaaaaccacttttgcgcccggatgctgatttttaataagctgtccgtgcgcctgcatcggtgatataacgttagctaggtatggcagaacatcgggatagtgcttttgtataagagtgttaacgctgtggcagcacgaggagattataacgctctgctttctgttttctataagcttttcatattctctcttgacaatggttgcacctacagcggtttccccagcgtctttaaagccgagtttttttaatgcgcttctcattatctctatgttaatgcccttataatttgctatatatgacggcgcgactgaggcgtatacttcatcgcctctgtcgataaacccttttgcggacggagtatcgtctcgaagtcttttggcgttctgagggcagttaacataacaccgtccgcagagaatacattcattgggaataatctcggcgtgcccctccacgacctttattgacttcatcggacagaatctaacgcatttataacaatttttacagtttgatttttcaagctgtatacaatttttttgcatgattacacatccttagttaactgtgtttaaaacatatctggagaaaatctcgttaaagttttctttggtcactccgctgataacctggtcgtcaaccttgatgctgaccccgtcgccgcagtggccgaggcagaatgcagcggacataccgaccgtttcatccagtccgttttctttgagggcgtctttcataaggttaataatatcgtaggagccgcggagatggcaggagcttcctatacaaactttgatatccattatgtactcctttcgggcggataatattccgaaaataattatcgccaaaaatatagagccggcaaaaatccgctctgtttcatataccttgattataaaggaaacacggtatattgtcaatgatttaacaactatatttttataaaatttatggaaaattaggataaagaaaaggtaagataattttgggcaaaataaaaacgccgcagaccacgcacctctcgtaatccacagcgtttccttatggtcggggtgacaggattcgaacctg

SEQ ID NO: 2 - DNA, 233 bp, Subdoligranulum sp.
  misc_feature 1..233: note = Fragment of genome; Region A
  source 1..233: mol_type = genomic DNA
atttaaaataaataaatataatggaatagatgtattaaaaagaaatataactaccgaaaacacacacataaacacttaatagtattttataactatcgagtgggaatgatatcacactcgcctgaaagccagtaaccgtgcgggttacaccgttctggatatatcttgtggcaacgttttggcaacacctgcaacataaattgtattgttccataaatatagagctaactgaa

SEQ ID NO: 3 - DNA, 1443 bp, Subdoligranulum sp.
  misc_feature 1..1443: note = Fragment of genome; Region B
  source 1..1443: mol_type = genomic DNA
ttgaatagagttatcttaatattatttcttttagatttgtttgtatcaacatgctcttttctaagttgaattatattattactgtctgatgtaactagaacagttataacagctatcgaaaatgataacaatatagcaattgaatttatttgaatgtctataaatgattgaaacaacttaggtaagtatattttatctctagacagaattacaatcaaagtaagcactaaagcaattaaccctgagattaacatacctacccatattttgtccatatatttgtaataatcgtacaccggtaatagtatagttttttttacaaatgctttaaacctcaacactttcacctcattccaattttaattgttctaataattgctgagccttttgaaagaagtcagcgctgtctacctcgttagtatcagatgtagtttcaacaataattttttcttttttcttaagttgttccgtatctaaaattgtatctccacctgattttacacataatctctttacttcattctcgttattatcaataagattataatatctctttatagcatctttagatatatatggactttttcgtccctttcgtttaaaaataatatcaacatattcagacatatcatctctatcagcaaattgtaaatacttatcatcaagagaatttctttcaacagttaactttaaaagagtaaacttttttgcaatattaagtttagctaaaaacccttcatccggaataaaatcactcgaaaaactatacctatactcatgattactaatatctgcaaaatttttcattttatgatataaataatttacaatttgacttattcctataccgttataatttttttcaaacatacataaaaatgtattacaccccttattatgtctaatacataaatgagtgcgttcttcatcaccatcaaattcacctttgagtattcctaaattatccatagttgaattatttcgaacatttcttctataattatacttaagtgacttaaagattatattataatttctgttatccaatgcctcaaaagagtccatccatagagtcttatttttatttggatattctattcttctttcgaccaatgtttggttagacaaattattcattgcatcaacaaaaaaaggtataaaatcctcaatagtaccttctggtaaatcaggcgaagtagccgtaatagttaaatttaagtaataaaaaccgacagagacatttttattcatacatatatcctccaaattaacaaaatattatttatctagataatacaatattttaaaataaatgtcaatatatgtaaaatatatcttaaactctataaaatatttattatagtacattatataaccaatcttgtgtcagtgcgtgccaaaaaaataaaggcgtaacaaatttatttgttctgcccttactat

SEQ ID NO: 4 - DNA, 24 bp, synthetic construct
  misc_feature 1..24: note = Primer pair 8- forward primer-Region A
  source 1..24: mol_type = other DNA
accgaaaacacacacataaacact

SEQ ID NO: 5 - DNA, 20 bp, synthetic construct
  misc_feature 1..20: note = Primer pair 8- reverse primer- Region A
  source 1..20: mol_type = other DNA
ggttactggctttcaggcga

SEQ ID NO: 6 - DNA, 22 bp, synthetic construct
  misc_feature 1..22: note = Primer pair 7-forward primer- Region A
  source 1..22: mol_type = other DNA
gggaatgatatcacactcgcct

SEQ ID NO: 7 - DNA, 21 bp, synthetic construct
  misc_feature 1..21: note = Primer pair 7- reverse primer- Region A
  source 1..21: mol_type = other DNA
ttgccaaaacgttgccacaag

SEQ ID NO: 8 - DNA, 20 bp, synthetic construct
  misc_feature 1..20: note = Primer pair 16- forward primer
  source 1..20: mol_type = other DNA
gtcagcgctgtctacctcgt

SEQ ID NO: 9 - DNA, 19 bp, synthetic construct
  misc_feature 1..19: note = Primer pair 16- reverse primer
  source 1..19: mol_type = other DNA
acggctacttcgcctgatt

SEQ ID NO: 10 - DNA, 20 bp, synthetic construct
  source 1..20: mol_type = other DNA
tcgcctgaaagccagtaacc

SEQ ID NO: 11 - DNA, 20 bp, synthetic construct
  source 1..20: mol_type = other DNA
aggtgttgccaaaacgttgc

SEQ ID NO: 12 - DNA, 20 bp, synthetic construct
  source 1..20: mol_type = other DNA
actcgcctgaaagccagtaa

SEQ ID NO: 13 - DNA, 20 bp, synthetic construct
  source 1..20: mol_type = other DNA
gttgccaaaacgttgccaca

SEQ ID NO: 14 - DNA, 20 bp, synthetic construct
  source 1..20: mol_type = other DNA
gcctgaaagccagtaaccgt

SEQ ID NO: 15 - DNA, 20 bp, synthetic construct
  source 1..20: mol_type = other DNA
ggtgttgccaaaacgttgcc

SEQ ID NO: 16 - DNA, 21 bp, synthetic construct
  source 1..21: mol_type = other DNA
tatcacactcgcctgaaagcc

SEQ ID NO: 17 - DNA, 21 bp, synthetic construct
  source 1..21: mol_type = other DNA
gccaaaacgttgccacaagat

SEQ ID NO: 18 - DNA, 20 bp, synthetic construct
  source 1..20: mol_type = other DNA
cctgaaagccagtaaccgtg

SEQ ID NO: 19 - DNA, 21 bp, synthetic construct
  source 1..21: mol_type = other DNA
tatgttgcaggtgttgccaaa

SEQ ID NO: 20 - DNA, 21 bp, synthetic construct
  source 1..21: mol_type = other DNA
actcgcctgaaagccagtaac

SEQ ID NO: 21 - DNA, 19 bp, synthetic construct
  source 1..19: mol_type = other DNA
gtgttgccaaaacgttgcc

SEQ ID NO: 22 - DNA, 19 bp, synthetic construct
  source 1..19: mol_type = other DNA
gtaaccgtgcgggttacac

SEQ ID NO: 23 - DNA, 22 bp, synthetic construct
  source 1..22: mol_type = other DNA
atttatgttgcaggtgttgcca

SEQ ID NO: 24 - DNA, 19 bp, synthetic construct
  source 1..19: mol_type = other DNA
gcctgaaagccagtaaccg

SEQ ID NO: 25 - DNA, 21 bp, synthetic construct
  source 1..21: mol_type = other DNA
caggtgttgccaaaacgttgc

SEQ ID NO: 26 - DNA, 20 bp, synthetic construct
  source 1..20: mol_type = other DNA
cagcgctgtctacctcgtta

SEQ ID NO: 27 - DNA, 20 bp, synthetic construct
  source 1..20: mol_type = other DNA
acggctacttcgcctgattt

SEQ ID NO: 28 - DNA, 20 bp, synthetic construct
  source 1..20: mol_type = other DNA
gcgctgtctacctcgttagt

SEQ ID NO: 29 - DNA, 21 bp, synthetic construct
  source 1..21: mol_type = other DNA
cacgcactgacacaagattgg

SEQ ID NO: 30 - DNA, 21 bp, synthetic construct
  source 1..21: mol_type = other DNA
tgagtgcgttcttcatcacca

SEQ ID NO: 31 - DNA, 20 bp, synthetic construct
  source 1..20: mol_type = other DNA
tacggctacttcgcctgatt

SEQ ID NO: 32 - DNA, 19 bp, synthetic construct
  source 1..19: mol_type = other DNA
cagcgctgtctacctcgtt

SEQ ID NO: 33 - DNA, 21 bp, synthetic construct
  source 1..21: mol_type = other DNA
tggtgatgaagaacgcactca

SEQ ID NO: 34 - DNA, 20 bp, synthetic construct
  source 1..20: mol_type = other DNA
tcaggcgaagtagccgtaat

SEQ ID NO: 35 - DNA, 20 bp, synthetic construct
  source 1..20: mol_type = other DNA
acgcactgacacaagattgg

SEQ ID NO: 36 - DNA, 20 bp, synthetic construct
  source 1..20: mol_type = other DNA
atcaggcgaagtagccgtaa

SEQ ID NO: 37 - DNA, 20 bp, synthetic construct
  source 1..20: mol_type = other DNA
ggcacgcactgacacaagat

SEQ ID NO: 38 - DNA, 20 bp, synthetic construct
  source 1..20: mol_type = other DNA
tcagcgctgtctacctcgtt

SEQ ID NO: 39 - DNA, 20 bp, synthetic construct
  source 1..20: mol_type = other DNA
attacggctacttcgcctga

SEQ ID NO: 40 - DNA, 20 bp, synthetic construct
  source 1..20: mol_type = other DNA
aatcaggcgaagtagccgta

SEQ ID NO: 41 - DNA, 19 bp, synthetic construct
  source 1..19: mol_type = other DNA
ggcacgcactgacacaaga

SEQ ID NO: 42 - DNA, 21 bp, synthetic construct
  source 1..21: mol_type = other DNA
gcgctgtctacctcgttagta

SEQ ID NO: 43 - DNA, 21 bp, synthetic construct
  source 1..21: mol_type = other DNA
acggctacttcgcctgattta

SEQ ID NO: 44 - DNA, 19 bp, synthetic construct
  source 1..19: mol_type = other DNA
tcagcgctgtctacctcgt

SEQ ID NO: 45 - DNA, 21 bp, synthetic construct
  source 1..21: mol_type = other DNA
tacggctacttcgcctgattt

SEQ ID NO: 46 - DNA, 20 bp, synthetic construct
  source 1..20: mol_type = other DNA
gagtgcgttcttcatcacca

SEQ ID NO: 47 - DNA, 21 bp, synthetic construct
  source 1..21: mol_type = other DNA
tggatggactcttttgaggca

SEQ ID NO: 48 - DNA, 20 bp, synthetic construct
  source 1..20: mol_type = other DNA
tgagtgcgttcttcatcacc

SEQ ID NO: 49 - DNA, 21 bp, synthetic construct
  source 1..21: mol_type = other DNA
cggctacttcgcctgatttac

SEQ ID NO: 50 - DNA, 21 bp, synthetic construct
  source 1..21: mol_type = other DNA
aatcaggcgaagtagccgtaa

SEQ ID NO: 51 - DNA, 19 bp, synthetic construct
  source 1..19: mol_type = other DNA
gcacgcactgacacaagat

SEQ ID NO: 52 - DNA, 21 bp, synthetic construct
  source 1..21: mol_type = other DNA
tcagcgctgtctacctcgtta

SEQ ID NO: 53 - DNA, 20 bp, synthetic construct
  source 1..20: mol_type = other DNA
ggtgatgaagaacgcactca

SEQ ID NO: 54 - DNA, 21 bp, synthetic construct
  source 1..21: mol_type = other DNA
agcgctgtctacctcgttagt

SEQ ID NO: 55 - DNA, 20 bp, synthetic construct
  source 1..20: mol_type = other DNA
tggtgatgaagaacgcactc

SEQ ID NO: 56 - DNA, 21 bp, synthetic construct
  source 1..21: mol_type = other DNA
gtgcgttcttcatcaccatca

SEQ ID NO: 57 - DNA, 21 bp, synthetic construct
  source 1..21: mol_type = other DNA
tcgcctgatttaccagaaggt

SEQ ID NO: 58 - DNA, 21 bp, synthetic construct
  source 1..21: mol_type = other DNA
aaatcaggcgaagtagccgta

SEQ ID NO: 59 - DNA, 18 bp, synthetic construct
  source 1..18: mol_type = other DNA
ggcacgcactgacacaag

SEQ ID NO: 60 - DNA, 21 bp, synthetic construct
  source 1..21: mol_type = other DNA
tggactttttcgtccctttcg

SEQ ID NO: 61 - DNA, 21 bp, synthetic construct
  source 1..21: mol_type = other DNA
tgatggtgatgaagaacgcac

SEQ ID NO: 62 - DNA, 21 bp, synthetic construct
  source 1..21: mol_type = other DNA
ggactttttcgtccctttcgt

SEQ ID NO: 63 - DNA, 22 bp, synthetic construct
  source 1..22: mol_type = other DNA
ttacggctacttcgcctgattt

SEQ ID NO: 64 - DNA, 18 bp, synthetic construct
  source 1..18: mol_type = other DNA
aacatcggtttgatcaac

SEQ ID NO: 65 - DNA, 20 bp, synthetic construct
  source 1..20: mol_type = other DNA
cgttgcatgttggtacccat
